(19) United States
(12) Patent Application Publication
(10) Pub. No.: US 2022/0306695 A1
(43) Pub. Date: Sep. 29, 2022

(54) COMPSTATIN ANALOGUES AND THEIR MEDICAL USES

(71) Applicant: ZP SPV 3 K/S, Søborg (DK)

(72) Inventors: Anne Pernille Tofteng Shelton, Søborg (DK); Henrik Fischer Munch, Søborg (DK)

(73) Assignee: ZP SPV 3 K/S, Søborg (DK)

(21) Appl. No.: 17/637,392

(22) PCT Filed: Aug. 26, 2020
(86) PCT No.: PCT/EP2020/073905

§ 371 Date: Feb. 22, 2022

(30) Foreign Application Priority Data
Aug. 27, 2019 (EP) 19193925.5
Apr. 29, 2020 (EP) 20172189.1

(51) Int. Cl. C07K 14/00; C07K 7/08

(52) U.S. Cl. CPC C07K 14/001; C07K 7/08

(57) ABSTRACT

Compstatin analogues having improved binding and complement-inhibiting activity as compared to the 13 amino acid compstatin peptide (ICWQDWGHHRCT (cyclic C2-C12)) are described, in particular compstatin analogues that additionally possess useful physicochemical properties. The analogues have a thioether bond rather than a disulfide bond between the side chains of the f residues corresponding to cysteines 2 and 12 of compstatin which may increase stability. The analogues may also have an isoleucine residue at position 3 in place of the wild type valine residue, which provides compstatin peptides with improved binding and complement-inhibiting activity and also enables the introduction of other modifications, for example modifications that are capable of increasing solubility, such as the introduction of charged or polar amino acids at position 9 and/or the introduction of N- and/or C-terminal sequences.

### FIELD OF THE INVENTION

[0001] The present invention relates to inhibiting activation of the complement cascade in the body, and more particularly to compstatin analogues that are capable of binding to C3 protein and inhibiting complement activation. The present invention also relates to the medical uses of the compstatin analogues, in particular for the treatment of conditions characterized by unwanted activation of the complement cascade, such as autoimmune and inflammatory diseases.

### BACKGROUND OF THE INVENTION

[0002] The human complement system is a powerful player in the defense against pathogenic organisms and the mediation of immune responses. Complement can be activated through three different pathways: the classical, lectin and alternative pathways. The major activation event that is shared by all three pathways is the proteolytic cleavage of the central protein of the complement system, C3, into its activation products C3a and C3b by C3 convertases. Generation of these fragments leads to the opsonization of pathogenic cells by C3b and iC3b, a process that renders them susceptible to phagocytosis or clearance, and to the activation of immune cells through an interaction with complement receptors (Markiewski & Lambris, 2007, Am. J. Pathol., 171: 715-727). Deposition of C3b on target cells also induces the formation of new convertase complexes and thereby initiates a self-amplification loop. An ensemble of plasma and cell surface-bound proteins carefully regulates complement activation to prevent host cells from self-attack by the complement cascade. However, excessive activation or inappropriate regulation of complement can lead to a number of pathologic conditions, ranging from autoimmune to inflammatory diseases (Holers, 2003, Clin. Immunol., 107: 140-51; Markiewski & Lambris, 2007, supra; Ricklin & Lambris, 2007, Nat. Biotechnol., 25: 1265-75; Sahu et al., 2000, J. Immunol., 165: 2491-9). The development of therapeutic complement inhibitors is therefore highly desirable. In this context, C3 and C3b have emerged as promising targets because their central role in the cascade allows for the simultaneous inhibition of the initiation, amplification, and downstream activation of complement (Ricklin & Lambris, 2007, supra).

[0003] Compstatin was first identified as a 27 amino acid peptide and was the first non-host-derived complement inhibitor that was shown to be capable of blocking all three activation pathways (Sahu et al., 1996, J. Immunol., 157: 884-91; U.S. Pat. No. 6,319,897). It has been shown that it is possible to truncate compstatin without loss of activity to a 13 amino acid peptide. However, attempts to further truncate this peptide led to loss of activity. The sequence of the 13 amino acid truncated (or “core”) compstatin peptide is lle¹-Cys²-Val³-Val⁴-Gln⁵-Asp⁶-Trp⁷-Gly⁸-His⁹-His¹⁰-Arg¹¹-Cys¹²-Thr¹³-NH₂, where Cys² and Cys¹² are disulfide bonded. This cyclic tridecapeptide binds to C3 (and fragments of C3), thereby inhibiting the activation of the downstream complement cascade and preventing the cleavage of native C3 by the C3 convertases. Its inhibitory efficacy was confirmed by a series of studies using experimental models that pointed to its potential as a therapeutic agent (Fiane et al, 1999a, Xenotransplantation, 6: 52-65; Fiane et al, 1999b, Transplant Proc., 31:934-935; Nilsson et al., 1998, Blood, 92: 1661-1667; Ricklin & Lambris, 2008, Adv. Exp. Med. BioL, 632: 273-292; Schmidt et al., 2003, J. Biomed. Mater. Res., A66: 491-499; Soulika et al., 2000, Clin. Immunol., 96: 212-221).

[0004] Progressive optimization of the 13 amino acid compstatin peptide has led to analogues with improved biological activity (Ricklin & Lambris, 2008, supra; WO 2004/026328; WO 2007/062249, WO 2013/036778, WO 2014/100407).

[0005] Earlier structure-activity studies have identified the cyclic nature of the compstatin peptide and the presence of both a β-turn and hydrophobic cluster as key features of the molecule (Morikis et al., 1998, Protein Sci., 7: 619-627; WO 99/13899; Morikis et al., 2002, J. Biol. Chem., 277:14942-14953; Ricklin & Lambris, 2008, supra). Hydrophobic residues at positions 4 and 7 were found to be of particular importance, and their modification with unnatural amino acids generated an analogue with 264-fold improved activity over the original compstatin peptide (Katragadda et al., 2006, J. Med. Chem., 49: 4616-4622; WO 2007/062249). Further attempts to optimize compstatin for use in the treatment of eye disorders are described in WO 2007/044668.

[0006] While previous optimization steps have been based on combinatorial screening studies, solution structures, and computational models (Chiu et al., 2008, Chem. Biol. Drug Des., 72: 249-256; Mulakala et al., 2007, Bioorg. Med. Chem., 15: 1638-1644; Ricklin & Lambris, 2008, supra), the publication of a co-crystal structure of compstatin complexed with the complement fragment C3c (Janssen et al., 2007, J. Biol. Chem., 282: 29241-29247; WO 2008/153963) provided a basis for initiating rational optimization. The crystal structure revealed a shallow binding site at the interface of macroglobulin (MG) domains 4 and 5 of C3c and showed that 9 of the 13 amino acids were directly involved in the binding, either through hydrogen bonds or hydrophobic interactions. As compared to the structure of the compstatin peptide in solution (Morikis et al., 1998, supra), the bound form of compstatin experienced a conformational change, with a shift in the location of the R-turn from residues 5-8 to 8-11 (Janssen et al., 2007, supra; WO 2008/153963).

[0007] In view of its therapeutic potential in AMD, C3G, PNH and other diseases, it remains a problem in the art to further optimize compstatin analogues, for example to achieve an even greater activity and/or to modulate pharmacokinetic properties, such as increased half-life in vivo and/or physicochemical properties such as increased solubility or stability.

### SUMMARY OF THE INVENTION

[0008] Broadly, the present invention is based on work to develop a new family of compstatin analogues having improved binding and complement-inhibiting activity as compared to the 13 amino acid compstatin peptide (ICWQDWGHHRCT (cyclic C2-C12)). In some cases, these compstatin analogues additionally possess useful physicochemical properties, such as increased solubility and pharmacokinetic properties. In particular, the present inventors found that introducing an isoleucine residue at position 3 in place of the wild type valine residue led to compstatin peptides with improved binding and complement-inhibiting activity. The present inventors further discovered that the introduction of isoleucine at position 3 enables the introduction of other modifications, for example modifications that are capable of increasing solubility, such as the introduction of glutamic acid at position 6, particular charged or polar amino acids at position 9, and/or the introduction of N- and/or C-terminal sequences. Example of such additional modifications include the replacement of Ile at position 1 with Tyr, Phe or Sar, replacement of Val at position 4 with Trp, a Trp analogue (as described herein); replacement of Asp in position 6 with Glu; replacement of His at position 9 with Ala, Glu, Asp, Lys, Ser or Arg; replacement of Arg at position 11 with Ser; replacement of Thr at position 13 with Ser, Glu, Sar or lie. Preferred compstatin peptides including one or more of these modifications have improved solubility, for example as compared to the 13 amino acid compstatin peptide (ICWQDWGHHRCT (cyclic C2-C12)). Further examples of these compstatin peptides combine modification at position 9 with extensions to the N-terminal and/or C-terminus of the peptide. Addition of acylation also has advantageous effects on pharmacokinetics.

[0009] Further, in the compounds of invention, the residues corresponding to cysteine 2 and cysteine 12 of compstatin have side chains which are linked via a thioether bond, instead of the disulfide bond found in compstatin. Amongst other advantages, it is believed that this may provide improvements in stability (e.g. physical or chemical stability) as compared to equivalent molecules containing disulfide bonds at the corresponding positions.

[0010] Accordingly, the present invention provides a compstatin analogue represented by the formula:

Y1-R1-X1-X2-I-X4-Q-X6-W-X8-X9-H-X11-X12-X13-R2-Y2 (Formula I)

wherein:

[0011] Y1 is hydrogen, acetyl or a lipophilic group Φ;

[0012] X1 is I, Y, F or Sar;

[0013] X4 is W, F, V, Y, 1-Me-Trp, D-Trp, N-Me-Trp, 1-For-Trp, 1-Nal, 2-Nal, 5-Me-Trp, Bpa or 2-lgl;

[0014] X6 is E, K or D;

[0015] X8 is G or Sar;

[0016] X9 is H, A, E, D, K, R or S;

[0017] X11 is R, S or K;

[0018] X13 is T, S, E, F, H, K, Sar, G, I, D, N-Me-Ile or N-Me-Thr;

[0019] X2 and X12 are residues whose side chains are linked by a thioether bond;

[0020] Y2 is NH₂, OH or a lipophilic group Φ;

[0021] R1 is absent or is a sequence of 1 to 6 amino acid residues selected from A, E, G, L, K, F, P, S, T, W, Y, R, V, Sar, εLys, γGlu, βAsp, or βAla, or a corresponding D form thereof; or Peg3, Peg4, or 8-aminooctanoyl, or derivatives thereof; and

[0022] R2 is absent or is a sequence of 1 to 8 amino acid residues selected from A, E, G, L, K, F, P, S, T, W, Y, R, V, Sar, εLys, γGlu, βAsp, or βAla, or a corresponding D form thereof; or Peg3, Peg4, or 8-aminooctanoyl, or derivatives thereof;

[0023] and wherein the compstatin analogue optionally has a lipophilic group Φ covalently linked to the side chain of one or more amino acid residues;

[0024] or a pharmaceutically acceptable salt and/or solvate thereof.

[0025] In some embodiments, X11 is R or S.

[0026] In some embodiments, if a lipophilic group Φ is linked to the side chain of an amino acid residue, that residue is the residue at position X1, X11 or X13, or is a residue in R1 or R2. It may be a lysine residue. For example, it may be a lysine residue at position X11 or X13, or a lysine residue in R1 or R2.

[0027] In some embodiments, Y1 is hydrogen or acetyl.

[0028] In some embodiments, Y2 is NH₂ or OH.

[0029] In some embodiments, the compstatin analogue comprises at least one lipophilic group 4, e.g. exactly one lipophilic group Φ.

[0030] In some embodiments, the compstatin analogue does not comprise a lipophilic group Φ.

[0031] The present invention further provides a compstatin analogue represented by the formula:

Y1-R1-X1-X2-I-X4-Q-X6-W-X8-X9-H-X11-X12-X13-R2-Y2 (Formula II)

wherein:

[0032] Y1 is hydrogen, acetyl, or a lipophilic group (D;

[0033] X1 is I, Y, F or Sar;

[0034] X4 is W, V, Y, 2-Nal, 1-Nal or 1-Me-Trp;

[0035] X6 is E or D;

[0036] X8 is G or Sar;

[0037] X9 is A, E, D, K or S;

[0038] X11 is R, S or K;

[0039] X13 is T, S, E, I, Sar, K, G or N-Me-lle;

[0040] X2 and X12 are residues whose side chains are linked by a thioether bond;

[0041] Y2 is NH₂, OH or a lipophilic group Φ;

[0042] R1 is absent or is a sequence of 1 to 6 amino acid residues selected from A, E, G, L, K, F, P, S, T, W, Y, R, V, Sar, εLys, γGlu, βAsp, or βAla, or a corresponding D form thereof, or Peg3, Peg4, or 8-aminooctanoyl, or derivatives thereof; and

[0043] R2 is absent or is a sequence of 1 to 8 amino acid residues selected from A, E, G, L, K, F, P, S, T, W, Y, R, V, Sar, εLys, γGlu, βAsp, or βAla, or a corresponding D form thereof; or Peg3 or Peg4, or 8-aminooctanoyl, or derivatives thereof;

[0044] and wherein the compstatin analogue optionally has a lipophilic group Φ covalently linked to the side chain of one or more amino acids;

[0045] or a pharmaceutically acceptable salt and/or solvate thereof.

[0046] In some embodiments, X11 is R or S.

[0047] In some embodiments, if a lipophilic group Φ is linked to the side chain of an amino acid residue, that residue is the residue at position X1, X11 or X13, or is a residue in R1 or R2. It may be a lysine residue. For example, it may be a lysine residue at position X13, or a lysine residue in R1 or R2.

[0048] In some embodiments, Y1 is hydrogen or acetyl.

[0049] In some embodiments, Y2 is NH₂ or OH.

[0050] In some embodiments, the compstatin analogue comprises at least one lipophilic group Φ, e.g. exactly one lipophilic group Φ.

[0051] In some embodiments of this formula, the compstatin analogue does not comprise a lipophilic group Φ.

[0052] The present invention further provides a compstatin analogue represented by the formula:

Y1-R1-X1-X2-I-X4-Q-X6-W-G-X9-H-X11-X12-X13-R2-Y2 (Formula III1)

wherein:

[0053] Y1 is hydrogen, acetyl or a lipophilic group Φ;

[0054] X1 is I, Y, F or Sar;

[0055] X4 is W, V, Y, 1-Nal, 2-Nal or 1-Me-Trp;

[0056] X6 is E or D;

[0057] X9 is A, E, D, K or S;

[0058] X11 is R, S or K;

[0059] X13 is T, I, S, E, K or Sar;

[0060] X2 and X12 are residues whose side chains are linked by a thioether bond;

[0061] Y2 is NH₂, OH or a lipophilic group Φ;

[0062] R1 is absent or is a sequence of 1 to 6 amino acid residues selected from A, E, G, L, K, F, P, S, T, W, Y, R, V, Sar, εLys, γGlu, βAsp, or βAla, or a corresponding D form thereof, or Peg3, Peg4, or 8-aminooctanoyl, or derivatives thereof; and

[0063] R2 is absent or is a sequence of 1 to 8 amino acid residues selected from A, E, G, L, K, F, P, S, T, W, Y, R, V, Sar, εLys, γGlu, βAsp, or βAla, or a corresponding D form thereof; or Peg3 or Peg4, or 8-aminooctanoyl, or derivatives thereof;

[0064] and wherein the compstatin analogue optionally has a lipophilic group Φ covalently linked to the side chain of one or more amino acids;

[0065] or a pharmaceutically acceptable salt and/or solvate thereof.

[0066] In some embodiments, X11 is R or S.

[0067] In some embodiments, if a lipophilic group Φ is linked to the side chain of an amino acid residue, that residue is the residue at position X1, X11 or X13, or is a residue in R1 or R2. It may be a lysine residue. For example, it may be a lysine residue at position X11 or X13, or a lysine residue in R1 or R2.

[0068] In some embodiments, Y1 is hydrogen or acetyl.

[0069] In some embodiments, Y2 is NH₂ or OH.

[0070] In some embodiments, the compstatin analogue comprises at least one lipophilic group Φ, e.g. exactly one lipophilic group Φ.

[0071] In some embodiments of this formula, the compstatin analogue does not comprise a lipophilic group Φ.

[0072] The compstatin analogue may be represented by the formula:

Y1-R1-X1-X2-X4-Q-X6-W-G-X9-H-R-X12-X13-R2-Y2 (Formula IV)

wherein:

[0073] Y1 is hydrogen, acetyl or a lipophilic group Φ;

[0074] X1 is I, Y, F or Sar;

[0075] X4 is W, V, Y, 1-Nal, 2-Nal or 1-Me-Trp;

[0076] X6 is E or D;

[0077] X9 is A, E, D, K or S;

[0078] X13 is T, S, E or Sar;

[0079] X2 and X12 are residues whose side chains are linked by a thioether bond;

[0080] Y2 is NH₂, OH or a lipophilic group Φ;

[0081] R1 is absent or is a sequence of 1 to 6 amino acid residues selected from A, E, G, L, K, F, P, S, T, W, Y, R, V, Sar, εLys, γGlu, βAsp, or βAla, or a corresponding D form thereof, or Peg3, Peg4, or 8-aminooctanoyl, or derivatives thereof; and

[0082] R2 is absent or is a sequence of 1 to 8 amino acid residues selected from A, E, G, L, K, F, P, S, T, W, Y, R, V, Sar, εLys, γGlu, βAsp, or βAla, or a corresponding D form thereof; or Peg3 or Peg4, or 8-aminooctanoyl, or derivatives thereof;

[0083] and wherein the compstatin analogue optionally has a lipophilic group Φ covalently linked to the side chain of one or more amino acids;

[0084] or a pharmaceutically acceptable salt and/or solvate thereof.

[0085] In some embodiments, if a lipophilic group Φ is linked to the side chain of an amino acid residue, that residue is the residue at position X1, X11 or X13, or is a residue in R1 or R2. It may be a lysine residue. For example, it may be a lysine residue at position X13, or a lysine residue in R1 or R2.

[0086] In some embodiments, Y1 is hydrogen or acetyl.

[0087] In some embodiments, Y2 is NH₂ or OH.

[0088] In some embodiments, the compstatin analogue comprises at least one lipophilic group Φ, e.g. exactly one lipophilic group Φ.

[0089] In some embodiments of this formula, the compstatin analogue does not comprise a lipophilic group Φ.

[0090] In some embodiments of the formulae above, X6 is D.

[0091] In one aspect, compstatin analogues which do not possess a lipophilic group Φ may be represented by the formula:

Y1-R1-X1-X2-I-X4-Q-X6-W-G-X9-H-R-X12-X13-R2-Y2 (Formula V)

wherein:

[0092] Y1 is hydrogen or acetyl;

[0093] X1 is Y or F;

[0094] X4 is W, Y, 1-Me-Trp;

[0095] X6 is E or D;

[0096] X9 is A, E or K;

[0097] X13 is T, E or Sar;

[0098] X2 and X12 are residues whose side chains are linked by a thioether bond;

[0099] Y2 is NH₂ or OH;

[0100] R1 is absent or is a sequence of 1 to 6 amino acid residues selected from A, E, G, L, K, F, P, S, T, W, Y, R, V, Sar, εLys, γGlu, βAsp, or βAla, or a corresponding D form thereof, or Peg3, Peg4, or 8-aminooctanoyl, or derivatives thereof; and

[0101] R2 is absent or is a sequence of 1 to 6 amino acid residues selected from A, E, G, L, K, F, P, S, T, W, Y, R, V, Sar, εLys, γGlu, βAsp, or βAla, or a corresponding D form thereof; or Peg3 or Peg4, or 8-aminooctanoyl, or derivatives thereof;

[0102] or a pharmaceutically acceptable salt and/or solvate thereof.

[0103] The compstatin analogue may be represented by the formula:

Y1-R1-X1-X2-1-[1-Me-Trp]-Q-X6-W-G-E-H-R-X12-X13-R2-Y2 (Formula VI)

wherein:

[0104] Y1 is hydrogen or acetyl;

[0105] X1 is Y or F;

[0106] X6 is E or D;

[0107] X13 is T, E or Sar;

[0108] X2 and X12 are residues whose side chains are linked by a thioether bond;

[0109] Y2 is NH₂ or OH;

[0110] R1 is absent or is a sequence of 1 to 6 amino acid residues selected from A, E, G, L, K, F, P, S, T, W, Y, R, V, Sar, εLys, γGlu, βAsp, or βAla, or a corresponding D form thereof, or Peg3, Peg4, or 8-aminooctanoyl, or derivatives thereof; and

[0111] R2 is absent or is a sequence of 1 to 6 amino acid residues selected from A, E, G, L, K, F, P, S, T, W, Y, R, V, Sar, εLys, γGlu, βAsp, or βAla, or a corresponding D form thereof; or Peg3 or Peg4, or 8-aminooctanoyl, or derivatives thereof;

[0112] or a pharmaceutically acceptable salt and/or solvate thereof.

[0113] In the formulae above X6 may be D. Alternatively it may be E.

[0114] In some embodiments, the compstatin analogue has the formula:

Y1-R1-X1-X2-I-X4-Q-X6-W-X8-X9-H-X11-X12-X13-R2-Y2 (Formula VII)

wherein:

[0115] Y1 is hydrogen, acetyl or a lipophilic group Φ;

[0116] X1 is I, Y, F or Sar;

[0117] X4 is W, V, 1-Me-Trp, 1-Nal or 2-Nal;

[0118] X6 is E, K or D;

[0119] X8 is G or Sar;

[0120] X9 is H, A, E, D, K, R or S;

[0121] X11 is R, S, K or K*;

[0122] X13 is T, S, E, Sar or N-Me-Ile;

[0123] X2 and X12 are residues whose side chains are linked by a thioether bond;

[0124] Y2 is NH₂ or OH;

[0125] R1 and R2 may be as defined in any of the formulae above, or elsewhere in this specification. In some embodiments, R1 is absent or is a sequence of 1 to 6 amino acid residues selected from A, E, G, K, K*, S, Y, or a corresponding D form thereof; and/or R2 is absent or is a sequence of 1 to 8 amino acid residues selected from A, E, G, K, K*, P, S, Peg3, γGlu, 8-aminooctanoyl, or a corresponding D form thereof;

[0126] wherein * indicates that the amino acid residue bears a lipophilic group Φ covalently linked to its side chain.

[0127] It may be desirable that the compstatin analogue comprises at least one lipophilic group Φ, e.g. exactly one lipophilic group Φ. Alternatively, it may comprise no lipophilic group Φ.

[0128] In an alternative aspect, compstatin analogues which comprise a lipophilic group Φ may be represented by the formula:

Y1-R1-X1-X2-I-X4-Q-X6-W-X8-X9-H-X11-X12-X13-R2-Y2 (Formula VIII)

wherein:

[0129] Y1 is hydrogen, acetyl or a lipophilic group 4);

[0130] X1 is I, Y, F or Sar;

[0131] X4 is W, V, Y, 2-Nal, 1-Nal or 1-Me-Trp;

[0132] X6 is E or D;

[0133] X8 is G or Sar;

[0134] X9 is A, E, D, K or S;

[0135] X11 is R, S or K*;

[0136] X13 is T, S, E, I, Sar, K, G or N-Me-lie;

[0137] X2 and X12 are residues whose side chains are linked by a thioether bond;

[0138] Y2 is NH₂, OH or a lipophilic group Φ;

[0139] R1 is absent or is a sequence of 1 to 6 amino acid residues selected from A, E, G, L, K, K*, F, P, S, T, W, Y, R, V or Sar, or a corresponding D form thereof;

[0140] R2 is absent or is a sequence of 1 to 8 amino acid residues selected from A, E, G, L, K, F, P, S, T, W, Y, R, V Sar, εLys, γGlu, βAsp, or βAla, or a corresponding D form thereof; or Peg 3 or Peg4, or 8-aminooctanoyl, or derivatives thereof;

[0141] wherein * indicates that the amino acid residue bears a lipophilic group Φ covalently linked to its side chain;

[0142] and wherein the compstatin analogue comprises at least one lipophilic group Φ, e.g. exactly one lipophilic group Φ;

[0143] or a pharmaceutically acceptable salt and/or solvate thereof.

[0144] In some embodiments, Y2 is NH₂ or OH.

[0145] The compstatin analogue may be represented by the formula:

Y1-R1-X1-X2-I-X4-Q-X6-W-G-X9-H-X11-X12-X13-R2-Y2 (Formula IX)

wherein:

[0146] Y1 is hydrogen, acetyl, or a lipophilic group Φ;

[0147] X1 is I, Y, F or Sar;

[0148] X4 is W, V, Y, 1-Nal, 2-Nal or 1-Me-Trp;

[0149] X6 is E or D;

[0150] X9 is A, E, D, K or S;

[0151] X11 is R, S or K*;

[0152] X13 is T, I, S, E, K or Sar;

[0153] X2 and X12 are residues whose side chains are linked by a thioether bond;

[0154] Y2 is NH₂, OH or a lipophilic group Φ;

[0155] R1 is absent or is a sequence of 1 to 6 amino acid residues selected from A, E, G, L, K, K*, F, P, S, T, W, Y, R, V or Sar, or a corresponding D form thereof;

[0156] R2 is absent or is a sequence of 1 to 8 amino acid residues selected from A, E, G, L, K, K* F, P, S, T, W, Y, R, V, Sar, εLys, γGlu, βAsp, or βAla, or a corresponding D form thereof; or Peg3 or Peg4, or 8-aminooctanoyl, or derivatives thereof;

[0157] wherein * indicates that the amino acid residue bears a lipophilic group Φ covalently attached to its side chain;

[0158] and wherein the compstatin analogue comprises at least one lipophilic group Φ, e.g. exactly one lipophilic group 4);

[0159] or a pharmaceutically acceptable salt and/or solvate thereof.

[0160] In some embodiments, Y2 is NH₂ or OH.

[0161] The compstatin analogue may be represented by the formula:

Y1-R1-X1-X2-I-X4-Q-X6-W-G-X9-H-R-X12-X13-R2-Y2 (Formula X)

wherein:

[0162] Y1 is hydrogen, acetyl or a lipophilic group Φ;

[0163] X1 is I, Y, F or Sar;

[0164] X4 is W, V, 1-Nal, 2-Nal or 1-Me-Trp;

[0165] X6 is E or D;

[0166] X9 is A, E, D, K or S;

[0167] X13 is T, S, E or Sar;

[0168] X2 and X12 are residues whose side chains are linked by a thioether bond;

[0169] Y2 is NH₂, OH or a lipophilic group Φ;

[0170] R1 is absent or is a sequence of 1 to 6 amino acid residues selected from A, E, G, L, K, K*, F, P, S, T, W, Y, R, V or Sar, or a corresponding D form thereof;

[0171] R2 is absent or is a sequence of 1 to 8 amino acid residues selected from A, E, G, L, K, K*, F, P, S, T, W, Y, R, V, Sar, εLys, γGlu, βAsp, or βAla, or a corresponding D form thereof; or Peg3 or Peg4, or 8-aminooctanoyl, or derivatives thereof;

[0172] wherein * indicates that the amino acid residue bears a lipophilic group Φ covalently attached to its amino acid side chain;

[0173] and wherein the compstatin analogue comprises at least one lipophilic group Φ, e.g. exactly one lipophilic group Φ;

[0174] or a pharmaceutically acceptable salt and/or solvate thereof.

[0175] In some embodiments, Y2 is NH₂ or OH.

[0176] In any of the formulae above, X6 may be D. Alternatively X6 may be E.

[0177] In any of the formulae above, X1 may be Y. Alternatively X1 may be F.

[0178] In any of the formulae above, X13 may be Sar. Alternatively X13 may be T.

[0179] Additionally or alternatively, any of the formulae above may comprise one of the following combinations of residues:

[0180] X4 is 1-Me-Trp and X9 is E.

[0181] X1 is F, X4 is 1-Me-Trp and X9 is E.

[0182] X4 is 1-Me-Trp, X9 is E and X13 is Sar.

[0183] X4 is 1-Me-Trp, X9 is E and X13 is T.

[0184] X4 is 1-Me-Trp, X6 is D, X9 is E and X13 is Sar.

[0185] X4 is 1-Me-Trp, X6 is E, X9 is E and X13 is Sar.

[0186] X4 is 1-Me-Trp, X6 is D, X9 is E and X13 is T.

[0187] X4 is 1-Me-Trp, X6 is E, X9 is E and X13 is T.

[0188] The compstatin analogue may be represented by the formula:

Y1-R1-X1-X2-I-[1-Me-Trp]-Q-X6-W-X8-E-H-R-X12-X13-R2-Y2 (Formula X1)

wherein:

[0189] Y1 is hydrogen or acetyl;

[0190] X1 is Y or F;

[0191] X6 is E or D;

[0192] X8 is G or Sar;

[0193] X13 is T, E or Sar;

[0194] X2 and X12 are residues whose side chains are linked by a thioether bond;

[0195] Y2 is NH₂ or OH;

[0196] R1 is absent or is a sequence of 1 to 6 amino acid residues selected from A, E, G, L, K, K*, F, P, S, T, W, Y, R, V or Sar, or a corresponding D form thereof;

[0197] R2 is absent or is a sequence of 1 to 8 amino acid residues selected from A, E, G, L, K, K* F, P, S, T, W, Y, R, V, Sar, εLys, γGlu, βAsp, or βAla, or a corresponding D form thereof; or Peg3 or Peg4, or 8-aminooctanoyl, or derivatives thereof;
[0198] wherein * indicates that the amino acid residue bears a lipophilic group (p covalently attached to its side chain;
[0199] and wherein the compstatin analogue comprises at least one lipophilic group Φ, e.g. exactly one lipophilic group Φ;
[0200] or a pharmaceutically acceptable salt and/or solvate thereof.

[0201] In some embodiments of Formula X1, X8 is G. In other embodiments, X8 is G or Sar, e.g.

[0202] Sar.

[0203] In the compounds of the invention, the side chains of the residues at positions X2 and X12 are linked by a thioether bond, i.e. they form a thioether bridge. The thioether bridge is believed to provide advantages in terms of stability as compared to identical molecules having a disulfide bond between the residues at the corresponding positions. Typically, the biological activity (e.g. potency of complement inhibition) is substantially maintained or even increased as compared to such molecules.

[0204] In any of the formulae above, the side chains of the residues at positions X2 and X12 may form a cystathionine (Ctt) bridge, e.g. a gamma cystathionine bridge (Ctt1) or a delta cystathionine bridge (Ctt2). A cystathionine bridge, and particularly a delta cystathionine bridge, may be particularly advantageous in terms of stability and activity (e.g. potency of complement inhibition) as compared to a disulfide bond between the residues at the corresponding positions.

[0205] A cystathionine bridge may be indicated by showing the participating residues as a homocysteine (hC) residue and an alanine (▴) residue, each designated “(1)” to denote the covalent linkage between the side chains. Thus, the residues at X2 and X12 may be hC(1) and A(1), in either order.

[0206] When X2 is hC(1) and X12 is A(1), the cystathionine is a gamma cystathionine bridge (Ctt1).

[0207] When X2 is A(1) and X12 is hC(1), the cystathionine is a delta cystathionine bridge (Ctt2).

[0208] Alternatively, the side chains of the residues at positions X2 and X12 may form a lanthionine bridge. A lanthionine bridge may be indicated by showing the participating residues as a cysteine (C) residue and an alanine (▴) residue, each designated “(1)” to denote the covalent linkage between the side chains. Thus, the residues at X2 and X12 may be C(1) and A(1), in either order.

[0209] In some embodiments, the 13-mer peptide portion (X1-X13) of the compstatin analogue has a sequence selected from:

[0210] [Sar]-X2-I[1-Me-Trp]QDWGEHR-X12-[Sar];

[0211] [Sar]-X2-1[1-Me-Trp]QDWGEHR-X12-T;

[0212] [Sar]-X2-I[1-Me-Trp]QEW[Sar]EHR-X12-T;

[0213] [Sar]-X2-I[1-Me-Trp]QEWGEHR-X12-[Sar];

[0214] [Sar]-X2-IWQDWGEHR-X12-T;

[0215] F-X2-1[1-Me-Trp]QDW[Sar]EHR-X12-[Sar];

[0216] F-X2-1I[1-Me-Trp]QDW[Sar]EHR-X12-T;

[0217] F-X2-l[1-Me-Trp]QDWGEHK-X12-[Sar];

[0218] F-X2-l[1-Me-Trp]QDWGEHR-X12-[Sar];

[0219] F-X2-I[1-Me-Trp]QDWGEHR-X12-E;

[0220] F-X2-I[1-Me-Trp]QDWGEHR-X12-S;

[0221] F-X2-1[1-Me-Trp]QDWGEHR-X12-T;

[0222] F-X2-I[1-Me-Trp]QEWGEHR-X12-[Sar];

[0223] F-X2-I[1-Nal]QDWGEHR-X12-T;

[0224] F-X2-1[2-Nal]QDWGEHR-X12-T;

[0225] F-X2-IWQDWGEHR-X12-[Sar];

[0226] F-X2-IWQDWGEHR-X12-T;

[0227] I-X2-I[1-Me-Trp]QDW[Sar]AHR-X12-[N-Me-Ile];

[0228] I-X2-1[1-Me-Trp]QDWGEHR-X12-[Sar];

[0229] I-X2-I[1-Me-Trp]QDWGEHR-X12-T;

[0230] I-X2-I[2-Nal]QDWGEHR-X12-[Sar];

[0231] I-X2-IWQDWGAHR-X12-E;

[0232] I-X2-IWQDWGAHR-X12-T;

[0233] I-X2-IWQDWGAHS-X12-T;

[0234] I-X2-IWQDWGDHR-X12-T;

[0235] I-X2-IWQDWGEHR-X12-[Sar];

[0236] I-X2-IWQDWGEHR-X12-E;

[0237] I-X2-IWQDWGEHR-X12-S;

[0238] I-X2-IWQDWGEHR-X12-T;

[0239] I-X2-IWQDWGEHS-X12-T;

[0240] I-X2-IWQDWGKHR-X12-T;

[0241] I-X2-IWQDWGRHR-X12-T;

[0242] I-X2-IWQDWGSHR-X12-T;

[0243] I-X2-IWQEWGEHR-X12-T;

[0244] I-X2-IWQKWGAHR-X12-T;

[0245] I-X2-IWQKWGEHR-X12-T;

[0246] Y-X2-1[1-Me-Trp]QDWGEHR-X12-[Sar];

[0247] Y-X2-1[1-Me-Trp]QDWGEHR-X12-T;

[0248] Y-X2-1[1-Me-Trp]QEWGEHR-X12-[Sar];

[0249] Y-X2-l[2-Nal]QDWGEHR-X12-T;

[0250] Y-X2-IWQDWGEHR-X12-T;

[0251] Y-X2-l[1-Me-Trp]QDWGEH[K*]-X12-[Sar]; and

[0252] Y-X2-1[1-Me-Trp]QEW[Sar]EHR-X12-[Sar];

[0253] wherein X2 and X12 are residues whose side chains are linked by a thioether bond; and wherein * indicates that the amino acid residue bears a lipophilic group Φ covalently attached to its side chain.

[0254] In some embodiments, the 13-mer peptide portion (X1-X13) of the compstatin analogue has a sequence selected from:

[0255] [Sar]hC(1)l[1-Me-Trp]QDWGEHRA(1)[Sar];

[0256] [Sar]hC(1)l[1-Me-Trp]QDWGEHRA(1)T;

[0257] [Sar]hC(1)1[1-Me-Trp]QEW[Sar]EHRA(1)T;

[0258] [Sar]hC(1)1[1-Me-Trp]QEWGEHRA(1)[Sar];

[0259] [Sar]hC(1)IWQDWGEHRA(1)T;

[0260] FhC(1)1[1-Me-Trp]QDW[Sar]EHRA(1)[Sar];

[0261] FhC(1)l[1-Me-Trp]QDW[Sar]EHRA(1)T;

[0262] FhC(1)1[1-Me-Trp]QDWGEHKA(1)[Sar];

[0263] FhC(1)l[1-Me-Trp]QDWGEHRA(1)[Sar];

[0264] FhC(1)l[1-Me-Trp]QDWGEHRA(1)E;

[0265] FhC(1)l[1-Me-Trp]QDWGEHRA(1)S;

[0266] FhC(1)l[1-Me-Trp]QDWGEHRA(1)T;

[0267] FhC(1)l[1-Me-Trp]QEWGEHRA(1)[Sar];

[0268] FhC(1)l[1-Nal]QDWGEHRA(1)T;

[0269] FhC(1)l[2-Nal]QDWGEHRA(1)T;

[0270] FhC(1)IWQDWGEHRA(1)[Sar];

[0271] FhC(1)IWQDWGEHRA(1)T;

[0272] IhC(1)1[1-Me-Trp]QDW[Sar]AHRA(1)[N-Me-lle];

[0273] IhC(1)1[1-Me-Trp]QDWGEHRA(1)[Sar];

[0274] IhC(1)I[1-Me-Trp]QDWGEHRA(1)T;

[0275] IhC(1)I[2-Nal]QDWGEHRA(1)[Sar];

[0276] IhC(1)IWQDWGAHRA(1)E;

[0277] IhC(1)IWQDWGAHRA(1)T;

[0278] IhC(1)IWQDWGAHSA(1)T;

[0279] IhC(1)IWQDWGDHRA(1)T;

[0280] IhC(1)IWQDWGEHRA(1)[Sar];

[0281] IhC(1)IWQDWGEHRA(1)E;

[0282] IhC(1)IWQDWGEHRA(1)S;

[0283] IhC(1)IWQDWGEHRA(1)T;

[0284] IhC(1)IWQDWGEHSA(1)T;

[0285] IhC(1)IWQDWGKHRA(1)T;

[0286] IhC(1)IWQDWGRHRA(1)T;

[0287] IhC(1)IWQDWGSHRA(1)T;

[0288] IhC(1)IWQEWGEHRA(1)T;

[0289] IhC(1)IWQKWGAHRA(1)T;

[0290] IhC(1)IWQKWGEHRA(1)T;

[0291] YhC(1)1[1-Me-Trp]QDWGEHRA(1)[Sar];

[0292] YhC(1)I[1-Me-Trp]QDWGEHRA(1)T;

[0293] YhC(1)1[1-Me-Trp]QEWGEHRA(1)[Sar];

[0294] YhC(1)l[2-Nal]QDWGEHRA(1)T;

[0295] YhC(1)IWQDWGEHRA(1)T;

[0296] YhC(1)1[1-Me-Trp]QDWGEH[K*]A(1)[Sar]; and

[0297] YhC(1)1[1-Me-Trp]QEW[Sar]EHRA(1)[Sar];

[0298] wherein the side chains of residues designated hC(1) and A(1) form a cystathionine bridge; and

[0299] wherein * indicates that the amino acid residue bears a lipophilic group Φ covalently attached to its side chain.

[0300] In some embodiments, the 13-mer peptide portion (X1-X13) of the compstatin analogue has a sequence selected from:

[0301] [Sar]A(1)1[1-Me-Trp]QDWGEHRhC(1)[Sar];

[0302] [Sar]A(1)1[1-Me-Trp]QDWGEHRhC(1)T;

[0303] [Sar]A(1)1[1-Me-Trp]QEW[Sar]EHRhC(1)T;

[0304] [Sar]A(1)1[1-Me-Trp]QEWGEHRhC(1)[Sar];

[0305] [Sar]A(1)IWQDWGEHRhC(1)T;

[0306] FA(1)1[1-Me-Trp]QDW[Sar]EHRhC(1)[Sar];

[0307] FA(1)1[1-Me-Trp]QDW[Sar]EHRhC(1)T;

[0308] FA(1)I[1-Me-Trp]QDWGEHKhC(1)[Sar];

[0309] FA(1)1[1-Me-Trp]QDWGEHRhC(1)[Sar];

[0310] FA(1)1[1-Me-Trp]QDWGEHRhC(1)E;

[0311] FA(1)I[1-Me-Trp]QDWGEHRhC(1)S;

[0312] FA(1)I[1-Me-Trp]QDWGEHRhC(1)T;

[0313] FA(1)1[1-Me-Trp]QEWGEHRhC(1)[Sar];

[0314] FA(1)1[1-Nal]QDWGEHRhC(1)T;

[0315] FA(1)1[2-Nal]QDWGEHRhC(1)T;

[0316] FA(1)IWQDWGEHRhC(1)[Sar];

[0317] FA(1)IWQDWGEHRhC(1)T;

[0318] IA(1)1[1-Me-Trp]QDW[Sar]AHRhC(1)[N-Me-Ile];

[0319] IA(1)I[1-Me-Trp]QDWGEHRhC(1)[Sar];

[0320] IA(1)1[1-Me-Trp]QDWGEHRhC(1)T;

[0321] IA(1)I[2-Nal]QDWGEHRhC(1)[Sar];

[0322] IA(1)IWQDWGAHRhC(1)E;

[0323] IA(1)IWQDWGAHRhC(1)T;

[0324] IA(1)IWQDWGAHShC(1)T;

[0325] IA(1)IWQDWGDHRhC(1)T;

[0326] IA(1)IWQDWGEHRhC(1)[Sar];

[0327] IA(1)IWQDWGEHRhC(1)E;

[0328] IA(1)IWQDWGEHRhC(1)S;

[0329] IA(1)IWQDWGEHRhC(1)T;

[0330] IA(1)IWQDWGEHShC(1)T;

[0331] IA(1)IWQDWGKHRhC(1)T;

[0332] IA(1)IWQDWGRHRhC(1)T;

[0333] IA(1)IWQDWGSHRhC(1)T;

[0334] IA(1)IWQEWGEHRhC(1)T;

[0335] IA(1)IWQKWGAHRhC(1)T;

[0336] IA(1)IWQKWGEHRhC(1)T;

[0337] YA(1)I[1-Me-Trp]QDWGEHRhC(1)[Sar];

[0338] YA(1)1[1-Me-Trp]QDWGEHRhC(1)T;

[0339] YA(1)I[1-Me-Trp]QEWGEHRhC(1)[Sar];

[0340] YA(1)I[2-Nal]QDWGEHRhC(1)T;

[0341] YA(1)IWQDWGEHRhC(1)T;

[0342] YA(1)I[1-Me-Trp]QDWGEH[K*]hC(1)[Sar]; and

[0343] YA(1)1[1-Me-Trp]QEW[Sar]EHRhC(1)[Sar];

[0344] wherein the side chains of residues designated A(1) and hC(1) form a cystathionine bridge; and wherein * indicates that the amino acid residue bears a lipophilic group Φ covalently attached to its side chain.

[0345] In some embodiments, the 13-mer peptide portion (X1-X13) of the compstatin analogue has a sequence selected from:

[0346] [Sar]C(1)I[1-Me-Trp]QDWGEHRA(1)[Sar];

[0347] [Sar]C(1)1[1-Me-Trp]QDWGEHRA(1)T;

[0348] [Sar]C(1)1[1-Me-Trp]QEW[Sar]EHRA(1)T;

[0349] [Sar]C(1)1[1-Me-Trp]QEWGEHRA(1)[Sar];

[0350] [Sar]C(1)IWQDWGEHRA(1)T;

[0351] FC(1)I[1-Me-Trp]QDW[Sar]EHRA(1)[Sar];

[0352] FC(1)l[1-Me-Trp]QDW[Sar]EHRA(1)T;

[0353] FC(1)1[1-Me-Trp]QDWGEHKA(1)[Sar];

[0354] FC(1)1[1-Me-Trp]QDWGEHRA(1)[Sar];

[0355] FC(1)l[1-Me-Trp]QDWGEHRA(1)E;

[0356] FC(1)l[1-Me-Trp]QDWGEHRA(1)S;

[0357] FC(1)l[1-Me-Trp]QDWGEHRA(1)T;

[0358] FC(1)l[1-Me-Trp]QEWGEHRA(1)[Sar];

[0359] FC(1)l[1-Nal]QDWGEHRA(1)T;

[0360] FC(1)l[2-Nal]QDWGEHRA(1)T;

[0361] FC(1)IWQDWGEHRA(1)[Sar];

[0362] FC(1)IWQDWGEHRA(1)T;

[0363] IC(1)1[1-Me-Trp]QDW[Sar]AHRA(1)[N-Me-Ile];

[0364] IC(1)I[1-Me-Trp]QDWGEHRA(1)[Sar];

[0365] IC(1)I[1-Me-Trp]QDWGEHRA(1)T;

[0366] IC(1)I[2-Nal]QDWGEHRA(1)[Sar];

[0367] IC(1)IWQDWGAHRA(1)E;

[0368] IC(1)IWQDWGAHRA(1)T;

[0369] IC(1)IWQDWGAHSA(1)T;

[0370] IC(1)IWQDWGDHRA(1)T;

[0371] IC(1)IWQDWGEHRA(1)[Sar];

[0372] IC(1)IWQDWGEHRA(1)E;

[0373] IC(1)IWQDWGEHRA(1)S;

[0374] IC(1)IWQDWGEHRA(1)T;

[0375] IC(1)IWQDWGEHSA(1)T;

[0376] IC(1)IWQDWGKHRA(1)T;

[0377] IC(1)IWQDWGRHRA(1)T;

[0378] IC(1)IWQDWGSHRA(1)T;

[0379] IC(1)IWQEWGEHRA(1)T;

[0380] IC(1)IWQKWGAHRA(1)T;

[0381] IC(1)IWQKWGEHRA(1)T;

[0382] YC(1)I[1-Me-Trp]QDWGEHRA(1)[Sar];

[0383] YC(1)I[1-Me-Trp]QDWGEHRA(1)T;

[0384] YC(1)I[1-Me-Trp]QEWGEHRA(1)[Sar];

[0385] YC(1)I[2-Nal]QDWGEHRA(1)T;

[0386] YC(1)IWQDWGEHRA(1)T;

[0387] YC(1)I[1-Me-Trp]QDWGEH[K*]A(1)[Sar]; and

[0388] YC(1)I[1-Me-Trp]QEW[Sar]EHRA(1)[Sar];

[0389] wherein the side chains of residues designated C(1) and A(1) form a lanthionine bridge; and wherein * indicates that the amino acid residue bears a lipophilic group Φ covalently attached to its side chain.

[0390] In some embodiments, R1 is absent or is a sequence of 1 to 6 amino acid residues selected from A, E, G, L, K, F, P, S, T, W, R, V or Sar, or a corresponding D form thereof, and/or R2 may be a sequence of 1 to 6 amino acid residues selected from A, E, G, L, K, F, P, S, T, W, R, V or Sar, or a corresponding D form thereof. In some embodiments, Q may also be an option for R1.

[0391] For example, R1 is selected from ESSA, AKGE, ASSE, ASES, GSAE, ESSE, ESGA, SEG, GES, ESS, EGSA, ESE, EGE, ESA, SAE, SGA, YLEA, GSA, KEK, EKG, ES, AS, SE, SA or E, and/or R2 is selected from GAES, EYGS, EGYA, EAGS, EAKS, EKSA, EGGS, EGGA, ESSG, ESAG, GEES, AEES, ESEG, AEGS, ESGS, SEGA, SEG, ESG, EAG, GAE, EGEA, EGE, EA, E, GE, EG, EKE or EKP.

[0392] In alternative embodiments, R1 is absent or is a sequence of 1 to 6 amino acid residues selected from A, E, G, L, K, F, P, S, T, W, Y, R, V, Sar, εLys, γGlu, βAsp, or βAla, or a corresponding D form thereof, or Peg3, Peg4, or 8-aminooctanoyl, or derivatives thereof.

[0393] In some embodiments, R1 is absent or is a sequence of 1 to 6 amino acid residue selected from A, E, G, L, K, F, P, S, T, W, Y, R, V or Sar, or a corresponding D form thereof.

[0394] For example, R1 may be absent or a sequence of 1 to 6 amino acid residues selected from A, E, G, K, S and Y, or a corresponding D-form thereof.

[0395] A lipophilic group Φ may be covalently linked to the side chain of one or more of the residues in Y1, especially to the side chain of a lysine residue (which may be designated K*). It may be desirable that the residue bearing Φ is at the N-terminus of Y1.

[0396] Examples of sequences for the group R1 include:

[0397] {d}Y, EGSE, AGSE, SASE, EYSE, GSE, ASE, ESSA, KGSA, AKGE, ASGE, ASSE, ASES, GSAE, ESSE, ESGA, SEG, GES, ESS, EGSA, ESE, EGE, ESA, SAE, SGA, YLEA, GSA, KEK, EKG, ES, RS, SR, AE, TE, KE, GE, FE, YE, AS, SE, RS, SR, SA, GE, S, Y and E.

[0398] In some embodiments, R1 is two amino acid residues in length, for example, AE, TE, KE, GE, FE, YE, AS, SE, SA, or GE; preferably AE, TE, KE, GE, FE, YE, SE, or GE.

[0399] In some embodiments, R1 is one amino acids in length, for example, E.

[0400] As mentioned above, a lipophilic group Φ may be covalently linked to the side chain of one or more of the residues in Y1, especially to the side chain of a lysine residue (which may be designated K*), e.g. to yield a sequence K*GSA.

[0401] R2 may be absent or is a sequence of 1 to 8 amino acid residues selected from A, E, G, L, K, F, P, S, T, W, Y, R, V, Sar, εLys, γGlu, βAsp, or βAla, or a corresponding D form thereof; or Peg3, Peg4, or 8-aminooctanoyl, or derivatives thereof.

[0402] For example, R2 may be absent or a sequence of 1 to 8 amino acid residues selected from A, E, G, K, S, γGlu, Peg3 or 8-aminooctanoyl or selected from A, E, G, K and S.

[0403] When K is present in R2, it may be desirable that K is present at the C-terminus of R2.

[0404] A lipophilic group Φ may be covalently linked to the side chain of one or more of the residues in Y2, especially to the side chain of a lysine residue. It may be desirable that the residue bearing Φ is at the C-terminus of R2.

### Examples of Sequences for the Group R2 Include

[0405] EGASGSG, EGAGSG, EGASAG, EGAGAG, EGESGSG, EGEGSG, EGESAG, EGEGAG, EK[γGlu]AK, EGEGG, EGAGG, EGESS, GAESK, EGAK, EGEK, EGG, EGK, EGKK, EGS,

[0406] EK, EGA, EGAK, EK[γGlu], EK[γGlu]-K, EGE-[Peg3, EGE[Peg3]-K, EGE[Peg3][Peg3], EGE[Peg3][Peg3]-K, EGE[Peg3][Peg3][Peg3], EAE[Peg3][Peg3], EAE[Peg3][Peg3]-K, GESESE, GAESES, EGESES, EGESESK, EGE[Peg3]-ES, EGE[Peg3]-ESK, GESESE, EGE-[8-aminooctanoyl], EGE-[8-aminooctanoyl]-K, EGE-[8-aminooctanoyl]-EK, EGEGGG, EGEGGGK, EK[γGlu]GGG, EK[γGlu]GGGK, EGE-[8-aminooctanoyl]-E, GAES, EYGS, EGYA, EAGS, EAKS, EKSA, ESGA, EGGS, EGGA, ESSG, ESAG, GEES, AEES, ESEG, AEGS, ESGS, SEGA, SEG, EGK, ESG, EAG, GAE, EGEA, EGE, EA, E, S, GE, GEK, EG, EA, EKE and EKP.

### Examples of Sequences for the Group R2 Include

[0407] EGASGSG, EGAGSG, EGASAG, EGAGAG, EGESGSG, EGEGSG, EGESAG, EGEGAG, EK[γGlu]AK, EK[γGlu]A, EGEGG, EGAGG, EGESS, GAESK, EGAK, EGEK, EGG, EGK, EGKK, EGS, EK, EGA, EGAK, EK[γGlu], EK[γGlu]-K, EGE[Peg3], EGE[Peg3]-K, EGE[Peg3][Peg3], EGE[Peg3][Peg3]-K, EGE[Peg3][Peg3][Peg3], EGE[Peg3][Peg3][Peg3]-K, EAE[Peg3][Peg3], EAE[Peg3][Peg3]-K, GESESE, GAESES, EGESES, EGESESK, EGE[Peg3]-ES, EGE[Peg3]-ESK, GESESE, EGE-[8-aminooctanoyl], EGE-[8-aminooctanoyl]-K, EGE-[8-aminooctanoyl]-EK, EGEGGG, EGEGGGK, EK[γGlu]GGG, EK[γGlu]GGGK, EGE-[8-aminooctanoyl]-E, E[Peg3][Peg3], E[Peg3][Peg3]-K, EA[Peg3][Peg3], EA[Peg3][Peg3]-K, GAES, EYGS, EGYA, EAGS, EAKS, EKSA, ESGA, EGGS, EGGA, ESSG, ESAG, GEES, AEES, ESEG, AEGS, ESGS, SEGA, SEG, EGK, ESG, EAG, GAE, EGEA, EGE, EA, E, S, GE, GEK, EG, EA, EKE and EKP.

[0408] As mentioned above, a lipophilic group Φ may be covalently linked to the side chain of one or more of the residues in R2, especially the side chain of a lysine residue, e.g. to yield a sequence EK[γGlu]AK*, EGKK*, EK[γGlu]K*, EGE[Peg3]-K*, EGESESK*, EGE[Peg3]-ESK*, EGE-[8-aminooctanoyl]-K*, EGE-[8-aminooctanoyl]-EK*, EGEGGGK*, EK[γGlu]GGGK*, EGE[Peg3][Peg3]-K*, EAE[Peg3][Peg3]-K*, GAESK*, EGAK*, EGEK*, EGK* EGE[Peg3]-ESK*, GESESEK*, GEK* or EK*.

[0409] As mentioned above, a lipophilic group Φ may be covalently linked to the side chain of one or more of the residues in R2, especially the side chain of a lysine residue, e.g. to yield a sequence EK[γGlu]AK*, EGKK*, EK[γGlu]K*, EGE[Peg3]-K*, EGESESK*, EGE[Peg3]-ESK*, EGE-[8-aminooctanoyl]-K*, EGE-[8-aminooctanoyl]-EK*, EGEGGGK*, EK[γGlu]GGGK*, EGE[Peg3][Peg3]-K*, EAE[Peg3][Peg3]-K*, EGE[Peg3][Peg3][Peg3]-K*, E[Peg3][Peg3]-K*, EA[Peg3][Peg3]-K*, GAESK*, EGAK*, EGEK*, EGK* EGE[Peg3]-ESK*, GESESEK*, GEK* or EK*.

[0410] Where R1 or R2 is one amino acid in length, it may be a D amino acid, e.g. {d}Y.

[0411] R1 and R2 may independently be present or absent. It may be desirable that R2 is present. Without wishing to be bound by any particular theory, it is believed that the presence of R1 and/or R2 may improve the stability of the compounds.

[0412] Preferred classes of compstatin analogues and exemplified compounds are discussed further below.

[0413] In a further aspect, the present invention provides a composition comprising a compstatin analogue of the present invention, or a pharmaceutically acceptable salt or solvate thereof, in admixture with a carrier. In some instances, the composition is a pharmaceutical composition and the carrier is a pharmaceutically acceptable carrier.

[0414] In a further aspect, the present invention provides a pharmaceutical composition comprising a compstatin analogue of the present invention, or a pharmaceutically acceptable salt or solvate thereof, in admixture with a pharmaceutically acceptable carrier, excipient or vehicle.

[0415] In a further aspect, the present invention provides a compstatin analogue of the present invention for use in therapy.

[0416] In a further aspect, the present invention provides a compstatin analogue of the present invention for use in a method of inhibiting complement activation. By way of example, inhibiting complement activation includes one or more biological activities selected from (1) binding to C3 protein, (2) binding to C3b protein and/or (3) inhibiting the cleavage of native C3 by C3 convertases. Examples of disease or condition that may be treated using the compstatin analogues of the present invention are discussed below.

[0417] In a further aspect, the present invention provides a compstatin analogue of the present invention for use in a method of inhibiting complement activation that occurs during cell or organ transplantation.

[0418] In a further aspect, the present invention provides a method of inhibiting complement activation for treating a subject in need thereof, the method comprising administering to the subject a compstatin analogue of the present invention thereby to inhibit complement activation in the subject. Examples of disease or condition that may be treated using the compstatin analogues of the present invention are discussed below.

[0419] In a further aspect, the present invention provides an ex vivo method of inhibiting complement activation during extracorporeal shunting of a physiological fluid, the method comprising contacting the physiological fluid with a compstatin of the present invention, thereby to inhibiting complement activation.

[0420] In a further aspect, the present invention provides the use of a compstatin analogue of the present invention in the preparation of a medicament for inhibiting complement activation. Examples of disease or condition that may be treated using the compstatin analogues of the present invention are discussed below.

[0421] Embodiments of the present invention will now be described by way of example and not limitation.

### DESCRIPTION OF THE FIGURES

[0422] FIG. 1(a-g): Normalized “ex vivo” activity of the alternative complement pathway over time after administration of a test compound at time 0 to non-human primates. Compounds were given subcutaneously at a dose of 1840 nmol/kg. Complement activity (alternative pathway) was measured using the Wieslab kit. Activity was normalized using the predose (0) sample (set to 100%) and the negative control included in the kit. Normalized activity or average normalized activity for animals and standard deviation is shown. (a) compound 61 (2 animals); (b) compound 123, compound 126 & comp 128, all with one animal per compound and Cp40 (2 animals); (c) compound 107, compound 111, compound 118 & compound 119 all with 2 animals per compound; (d) compound 104 & compound 106 with 2 animals per compound; (e) compound 54 (2 animals), and compound 122, compound 124, compound 139, and compound 140 all with 1 animal per compound; (f) compound 141, compound 142, compound 127 and compound 130, all with one animal per compound; (g) compounds 146, 148 and 150 (all one animal each), and Cp40 (four animals); (h) compounds 147 and 148 (one animal each).

[0423] FIG. 2: Timecourses showing degradation over time of Compounds 126 and 156 at 50 mg/ml in buffers F1, F2, F3: Compound 126y: F1 (▪), F2 (▴) and F3 (●) Compound 156: F1 (+), F2 (x) and F3 (♦).

[0424] FIG. 3: Outline of the synthetic route for compound 146 (Scheme 1 b) 27

### DETAILED DESCRIPTION

[0425] “and/or” where used herein is to be taken as specific disclosure of each of the two specified features or components with or without the other. For example “A and/or B” is to be taken as specific disclosure of each of (i) A, (ii) B and (iii) A and B, just as if each is set out individually herein.

[0426] Unless context dictates otherwise, the descriptions and definitions of the features set out above are not limited to any particular aspect or embodiment of the invention and apply equally to all aspects and embodiments which are described.

[0427] Various publications, including patents, published applications, technical articles and scholarly articles are cited throughout the specification. Each of these cited publications is incorporated by reference herein, in its entirety.

[0428] Unless otherwise defined herein, scientific and technical terms used in this application shall have the meanings that are commonly understood by those of ordinary skill in the art.

[0429] Generally, nomenclature used in connection with, and techniques of, chemistry, molecular biology, cell and cancer biology, immunology, microbiology, pharmacology, and protein and nucleic acid chemistry, described herein, are those well known and commonly used in the art.

[0430] Each embodiment of the invention described herein may be taken alone or in combination with one or more other embodiments of the invention.

[0431] Unless specified otherwise, the following definitions are provided for specific terms which are used in the present written description.

### Definitions

[0432] Throughout this specification, the word “comprise”, and grammatical variants thereof, such as “comprises” or “comprising”, will be understood to imply the inclusion of a stated integer or component, or group of integers or components, but not the exclusion of any other integer or component, or group of integers or components.

[0433] The singular forms “a,” “an,” and “the” include the plurals unless the context clearly dictates otherwise.

[0434] The term “including” is used to mean “including but not limited to”. “Including” and “including but not limited to” may be used interchangeably.

[0435] The terms “patient”, “subject” and “individual” may be used interchangeably. A subject may be a mammal, including a human or a non-human mammal, such as a non-human primate (e.g. ape, Old World monkey or New World monkey), livestock animal (e.g. bovine or porcine), companion animal (e.g. canine or feline) or laboratory animal such as a rodent (e.g. mouse or rat).

[0436] Throughout the present description and claims the conventional three-letter and one-letter codes for naturally occurring amino acids are used, i.e. A (Ala), G (Gly), L (Leu), I (lie), V (Val), F (Phe), W (Trp), S (Ser), T (Thr), Y (Tyr), N (Asn), Q (GIn), D (Asp), E (Glu), K (Lys), R (Arg), H (His), M (Met), C (Cys) and P (Pro); as well as generally accepted three-letter codes for other a-amino acids, such as norleucine (Nle), sarcosine (Sar), homocysteine (hCys; hC), α-aminoisobutyric acid (Aib), 2,3-diaminopropanoic acid (Dap), 2,4-diaminobutanoic acid (Dab) and 2,5-diaminopentanoic acid (ornithine; Orn), 1-methyl-tryptophan(1-Me-Trp, 1Me-Trp or 1MeTrp), 1-formyl-tryptophan (1-For-Trp or 1For-Trp or 1ForTrp), 1-naphthalene (1-Nal or 1 Nal), 2-naphthalene (2-Nal or 2Nal), 5-methyl-tryptophan (5-Me-Trp or 5Me-Trp or 5MeTrp), β-Benzoyl-phenylalanine (Bpa) 2-indanylglycine (21 gl or 2-lgl). Other α-amino acids may be shown in square brackets “[ ]” (e.g. “[Nle]”) when used in a general formula or sequence in the present specification, especially when the rest of the formula or sequence is shown using the single letter code. The 20 “naturally occurring” amino acids listed above are those which are encoded by the standard genetic code, and may also be referred to as “proteinogenic” amino acids.

[0437] Gamma-Glu and beta-Asp, also referred to as γGlu (γ-Glu) and βAsp (β-Asp) (or isoGlu and isoAsp), refers to glutamate or aspartate participating in peptide bonds via the γ- or β-carboxylic acid respectively (normally regarded as the side chain carboxyl groups), rather than the conventional configuration. Similarly, εLys or isoLys refers to lysine participating in a peptide bond via the epsilon amino group (normally regarded as the side chain amino group) rather than the alpha amino group.

[0438] Beta-Ala, also referred to as β-Ala or βAla, refers to 3-aminopropanoic acid.

[0439] Peg3 refers to a residue of 8-amino-3,6-dioxaoctanoic acid (also known as {2-[2-aminoethoxy]ethoxy}acetic acid) and Peg4 refers to a residue of 11-amino-3,6,9-trioxaundecanoic acid. The Peg3 residue may also be denoted [8-Amino-3,6-dioxaoctanoyl].

[chemical structure]

[0440] Unless otherwise specified, amino acid residues in peptides of the invention are of the L-configuration. However, in some instances, D-configuration amino acids may be incorporated. In the present context, an amino acid code written with a small letter represents the D-configuration of said amino acid, e.g. “k” represents the D-configuration of lysine (K), or a D-configuration amino acid may be written as (d)X or {d}X, where X is the amino acid, e.g. (d)Y or {d}Y represents the D-configuration of tyrosine (Y).

[0441] In compounds of the invention, the side chains of the residues at positions X2 and X12 (corresponding to the cysteine residues at positions 2 and 12 of compstatin) are linked by a thioether bond.

[0442] Thus the side chains of the residues at X2 and X12 may together represent a cystathionine bridge. In the context of peptides of the invention, a cystathionine bridge may have two orientations:

[chemical structure]

[0443] For ease of reference, it may be convenient to refer to the residues nominally present at positions X2 and X12 “before” formation of a thioether.

[0444] A cystathionine bridge may be considered to consist of the sulphur atom of a homocysteine side chain covalently linked to the beta-carbon atom (i.e. the side chain carbon atom) of an alanine residue. Thus, the residues at X2 and X12 could be considered to be homocysteine and alanine, in either order.

[0445] Alternatively, a cystathionine bridge may be considered to be the product of a condensation reaction between homocysteine and serine to form a thioether bond. Thus, the residues at X2 and X12 may be considered to be homocysteine and serine, in either order.

[0446] In Some Embodiments Therefore:

[0447] X2 is homocysteine (hC) and X12 is alanine (▴) (designated cystathionine 1 (Ctt1) or gamma-cystathionine) or

[0448] X2 is alanine (▴) and X12 is homocysteine (hC) (designated cystathionine 2 (Ctt2) or delta-cystathionine).

[0449] The notation used should not be taken to imply any particular method of synthesis.

[0450] Alternatively, the side chains of the residues at X2 and X12 may together represent a lanthionine (3,3-thiodialanine) bridge:

[chemical structure]

[0451] A lanthionine bridge may be considered to consist of the sulphur atom of a cysteine side chain covalently linked to the beta-carbon atom (i.e. the side chain carbon atom) of an alanine residue. Alternatively, it could be considered to be the product of a condensation reaction between cysteine and serine.

[0452] Thus, it may be convenient to refer to the residues nominally present at X2 and X12 as cysteine and alanine.

[0453] In the context of peptides of the invention, a lanthionine bridge is symmetrical and can have only one orientation, so it is irrelevant which residue is considered to be present at each position.

[0454] (Still further alternatively, a lanthionine bridge may be considered to be a thioether dimer of cysteine, so the residues at X2 and X12 could each be designated as cysteine. However, it will be understood that they are linked by a thioether bond rather than a disulfide bond.)

[0455] Thus, in some embodiments:

[0456] X2 is homocysteine and X12 is alanine (Ctt 1; gamma-cystathionine);

[0457] X2 is alanine and X12 is homocysteine (Ctt 2; delta-cystathionine); or

[0458] X2 is cysteine and X12 is alanine.

[0459] In addition to compounds having thioether bonds between the residues at positions X2 and X12, the examples describe molecules having similar peptide backbone sequences and acylations to the compounds of the invention, but containing cysteine residues at positions X2 and X12 linked by a disulfide bond.

[0460] In formulae using single letter amino acid notation in this specification, residues whose side chains participate in covalent bond are indicated by “(1)”.

[0461] Thus, for example:

[0462] the sequence IC(1)IWQDWGAHRC(1)T contains a disulfide bond;

[0463] the sequence IhC(1)IWQDWGAHRA(1)T contains a Ctt 1 (gamma-cystathionine) bridge;

[0464] the sequence IA(1)IWQDWGAHRhC(1)T contains a Ctt 2 (delta-cystathionine) bridge;

[0465] the sequences IC(1)IWQDWGAHRA(1)T and IA(1)IWQDWGAHRC(1)T both contain a lanthionine bridge and would represent the same compound;

[0466] The terminal groups present at the N- and C-termini of the peptide backbone are designated Y1 and Y2 respectively. Thus Y1 is bonded to the nitrogen atom of the N-terminal amino group and Y2 is bonded to the C-terminal carbonyl carbon atom.

[0467] Y1=hydrogen (also indicated as “H-” or “Hy-”) indicates a hydrogen atom, corresponding to the presence of a free primary or secondary amino group at the N-terminus. Y1=acetyl (“Ac”) indicates the presence of an N-terminal secondary acetyl amide group.

[0468] Y2=“OH” or “NH₂” indicates the presence of a carboxy (COOH) group or an amido (CONH₂) group at the C-terminus of the molecule.

[0469] Either or both of Y1 and Y2 may alternatively be a lipophilic group Φ. Typically, only one of Y1 or Y2 will be a lipophilic group Φ.

[0470] In some embodiments, whether or not the molecule comprises a lipophilic group elsewhere, Y2 is NH₂ or OH. In some embodiments, Y1 is hydrogen or acetyl, and Y2 is OH or NH₂.

[0471] In some embodiments, whether or not the molecule comprises a lipophilic group elsewhere, Y2 is NH₂. In some embodiments, Y1 is hydrogen or acetyl, and Y2 is NH₂.

[0472] In some embodiments, whether or not the molecule comprises a lipophilic group elsewhere, Y2 is NH₂ and Y1 is acetyl.

[0473] Various terms relating to the methods and other aspects of the present invention are used throughout the specification and claims. Such terms are to be given their ordinary meaning in the art unless otherwise indicated. Other specifically defined terms are to be construed in a manner consistent with the definition provided herein. The term “about” as used herein when referring to a measurable value such as an amount, a temporal duration, and the like, is meant to encompass variations of ±20% or +10%, in some embodiments ±5%, in some embodiments ±1%, and in some embodiments ±0.1% from the specified value, as such variations are appropriate to make and used the disclosed compounds and compositions.

[0474] The term “full length compstatin” as used herein refers to a 27 amino acid peptide having the sequence IC(1)VVQDWGHHRC(1)TAGHMANLTSHASAI, wherein C(1) denotes the cysteine residue linked by a disulfide bond. As described above, a truncated form of full length compstatin, the tridecapeptide lle¹-Cys²-Val³-Val⁴-Gln⁵-Asp⁶-Trp⁷-Gly⁸-His⁹-His¹⁰-Arg¹¹-Cys¹²-Thr¹³-NH₂ linked by a disulfide bond between the cysteine residues at positions 2 and 12 retains the activity of the full length peptide. An N-terminally acetylated version of this tridecapeptide peptide is referred to herein as “Ac-compstatin”.

[0475] The term “compstatin analogue” refers to a modified Ac-compstatin comprising one or more substitutions of natural and unnatural amino acids, or amino acid analogs, as well as modifications within or between various amino acids, as described in greater detail herein. A compstatin analogue may comprise about 1, 2, 3, 4 or 5 amino acid modifications relative to Ac-compstatin. A compstatin analogue may comprise 5, 6, 7, 8 or more amino acid modifications relative to Ac-compstatin. A compstatin analogue may comprise about 5, 6, 7 or 8 amino acid modifications relative to Ac-compstatin.

[0476] The term “analogue” is frequently used for a protein or peptide in question before it undergoes further chemical modification (derivatisation), and in particular acylation. The product resulting from such a chemical modification (derivatisation) is sometimes referred to as a “derivative” or “acylated analogue”. However, in the context of this application, the term “analogue” designates analogues of Ac-compstatin as well as (the acylated) derivatives of such Ac-compstatin analogues.

[0477] When referring to the position of amino acids or analogs within Ac-compstatin or compstatin analogs, the positions are numbered from 1 (lie in compstatin) to 13 (Thr in compstatin). For example, the Gly residue occupies “position 8.” As used to describe the compstatin analogue peptides of the present invention “C(1)” denotes a disulfide bond between the respective cysteine residues in the compstatin analogue.

[0478] The terms “pharmaceutically active” and “biologically active” refer to the ability of the compounds of the invention to bind C3 or fragments thereof and inhibit complement activation. The biological activities of compstatin analogs may be measured by one or more of several art-recognized assays, as described in greater detail herein.

[0479] As used herein, “L-amino acid” refers to any of the naturally occurring levorotatory alpha-amino acids normally present in proteins or the alkyl esters of those alpha-amino acids. The term “D-amino acid” refers to dextrorotatory alpha-amino acids. Unless specified otherwise, all amino acids referred to herein are L-amino acids.

[0480] “Hydrophobic” or “non-polar” are used synonymously herein, and refer to any inter- or intra-molecular interaction not characterized by a dipole.

[0481] As used herein, “pharmaceutically-acceptable salts” refers to derivatives of the disclosed compounds wherein the parent compound is modified by making acid or base salts thereof.

[0482] Examples of pharmaceutically-acceptable salts include, but are not limited to, mineral or organic acid salts of basic residues such as amines; alkali or organic salts of acidic residues such as carboxylic acids; and the like. Thus, the term “acid addition salt” refers to the corresponding salt derivative of a parent compound that has been prepared by the addition of an acid. The pharmaceutically-acceptable salts include the conventional salts or the quaternary ammonium salts of the parent compound formed, for example, from inorganic or organic acids. For example, such conventional salts include, but are not limited to, those derived from inorganic acids such as hydrochloric, hydrobromic, sulfuric, sulfamic, phosphoric, nitric and the like; and the salts prepared from organic acids such as acetic, propionic, succinic, glycolic, stearic, lactic, malic, tartaric, citric, ascorbic, pamoic, maleic, hydroxymaleic, phenylacetic, glutamic, benzoic, salicylic, sulfanilic, 2-acetoxybenzoic, fumaric, toluenesulfonic, methanesulfonic, ethane disulfonic, oxalic, isethionic, and the like. Certain acidic or basic compounds of the present invention may exist as zwitterions. All forms of the compounds, including free acid, free base, and zwitterions, are contemplated to be within the scope of the present invention.

[0483] Compstatin Analogues

[0484] Ac-Compstatin, an N-terminally acetylated 13 amino acid peptide, is known to bind to C3 and prevent C3 convertase-mediated cleavage. Since its discovery by phage display, modification to the 13 amino acid Ac-Compstatin sequence has been carried out in an effort to find analogues with increased biological activity. However, in the core sequence between the two cysteines residues at positions 2 and 12, alanine scanning experiments have previously produced analogues showing only modest improvements in biological activity, with few modifications being tolerated. The modifications include changing the valine at position 4 to tryptophan, or a tryptophan analogue, that leads to an increase in biological activity and changing the histidine at position 9 to alanine or analogs thereof.

[0485] In particular, previous attempts to introduce modifications to the valine residue at position 3, replacing it with glycine, alanine, D-valine or leucine have been shown to lead to a decrease in biological activity. In contrast to these prior art findings, the present inventors surprisingly found that a change of valine to isoleucine is well tolerated and provides improvements in biological activity, as shown in the Examples below.

[0486] Without wishing to be bound by any specific theory, the present inventors reasoned that this modification might be combined with introduction of one or more polar or charged amino acids in the core sequence and may be used as an approach to increase the ability of the compstatin peptides to solubilize. Initially, glutamic acid or serine at position 9 were combined with valine 3 and led to a decrease in activity compared to the reference sequence 4W9A. However, when these changes were combined with the introduction of isoleucine at position 3, a surprising increase in biological activity was observed, in particular for the combination of isoleucine at position 3 and glutamic acid at position 9. This observation correlates with improved binding to C3 as measured by surface plasmon resonance (SPR), see Table 7 and Table 8.

[0487] In a further series of experiments to validate these findings, compstatin peptides with glutamic acid at position 9 are combined with different substitutions in position 3 which would normally be considered “conservative” replacements for isoleucine, again showing that the peptides with isoleucine at position 3 are most active.

[0488] Taken together, these experiments show that replacing the valine residue at position 3 with isoleucine surprisingly provides compstatin peptides having increased biological activity and improved binding to C3. Furthermore, the experiments surprisingly demonstrate that these changes can be readily combined with other modifications in the core sequence of the compstatin analogues and with addition of N and C-terminal sequences, for example for improving the solubility of the compstatin peptides, e.g. at higher concentrations.

[0489] Introduction of isoleucine instead of valine at position 3 of a further prior art compound designated “Cp40” (Qu et al., Immunobiology 2013, 281(4): 496-505; also referred to in that paper as “peptide 14) also increased the binding affinity to C3 as measured by SPR.

[0490] In any embodiment X1 may be Y, I or F. In any embodiment, X4 may be W, V, 1-Nal, 2-Nal or 1-Me-Trp. In any embodiment, X6 may be E or D. In any embodiment, X9 may be A, E, D, K or S. In any embodiment, X13 may be T, S, E, I, Sar, K, or G. In any embodiment, X13 may be T, I, S, E, K or Sar. In any embodiment, X13 may be T, S, E or Sar.

[0491] Lipophilic Substituents

[0492] The compstatin analogues may bear a lipophilic group, designated Φ.

[0493] The lipophilic group may be covalently linked to the N-terminus and/or the C terminus of the molecule, i.e. Y1 may be Φ(in place of H or Ac) and/or Y2 may be Φ(in place of OH or NH2).

[0494] Additionally or alternatively, the lipophilic group may be covalently linked to the side chain of an amino acid residue within the analogue. The residue may be part of R1, R2 or the compstatin analogue portion X1-X13 of the molecule.

[0495] The lipophilic group Φ is typically attached via an acyl group. The modification may therefore be termed acylation but can also be referred to as lipidation.

[0496] The lipophilic group includes a long chain alkylene group derived from a fatty acid, termed Z¹ herein and referred to as the lipophilic substituent. Without wishing to be bound by theory, it is believed that a lipophilic substituent binds plasma proteins (e.g. albumin) in the blood stream, thus shielding the compounds employed in the context of the invention from enzymatic degradation, and thereby enhancing the half-life of the compounds. The lipophilic substituent may also modulate the potency of the compound.

[0497] Z¹ may be attached directly to the amino acid sequence (including the R1 and R2 extensions, or as Y1) or via a spacer Z² as defined herein.

[0498] In other words, Φ may be Z¹- or Z¹-Z²-.

[0499] Where Y1 is Φ, Φ is preferably Z¹-.

[0500] Where the lipophilic group Φ is linked to an amino acid side chain (i.e. where Y1 is hydrogen or Ac) Φ may preferably be Z¹-Z²_.

[0501] In certain embodiments, only one amino acid side chain is conjugated to a lipophilic substituent. In other embodiments, two amino acid side chains are each conjugated to a lipophilic substituent. In yet further embodiments, three or even more amino acid side chains are each conjugated to a lipophilic substituent. When a compound contains two or more lipophilic substituents, they may be the same or different substituents.

[0502] In certain embodiments, only one lipophilic group Φ is present in the molecule.

[0503] The term “conjugated” is used here to describe the covalent attachment of one identifiable chemical moiety to another, and the structural relationship between such moieties. It should not be taken to imply any particular method of synthesis. The one or more spacers Z², when present, are used to provide a spacing between the compound and the lipophilic substituent Z¹.

[0504] A lipophilic substituent may be attached to an N-terminal nitrogen, or to an amino acid side chain or to a spacer via an ester, a sulphonyl ester, a thioester, an amide or a sulphonamide.

[0505] Accordingly, it will be understood that a lipophilic substituent may include an acyl group, a sulphonyl group, an N atom, an O atom or an S atom which forms part of the ester, sulphonyl ester, thioester, amide or sulphonamide.

[0506] Suitably, an acyl group in the lipophilic substituent forms part of an amide or ester with the N-terminal nitrogen, or amino acid side chain, or the spacer. The lipophilic substituent may include a hydrocarbon chain having 10 to 24 carbon (C) atoms, e.g. 10 to 22 C atoms, e.g. 10 to 20 C atoms. Preferably, it has at least 11 C atoms, and preferably it has 18 C atoms or fewer. For example, the hydrocarbon chain may contain 12, 13, 14, 15, 16, 17 or 18 carbon atoms. The hydrocarbon chain may be linear or branched and may be saturated or unsaturated.

[0507] The hydrocarbon chain may incorporate a phenylene or piperazinylene moiety in its length as, for example, shown below (wherein—represents the points of attachment within the chain). These groups should be “counted” as 4 carbon atoms in the chain length.

[chemical structure]

[0508] From the discussion above, it will be understood that the hydrocarbon chain may be substituted with a moiety which forms part of the attachment to the amino acid side chain or the spacer, for example an acyl group, a sulphonyl group, an N atom, an O atom or an S atom. Most preferably, the hydrocarbon chain is substituted with an acyl group, and accordingly the hydrocarbon chain may be part of an alkanoyl group, for example a dodecanoyl, 2-butyloctanol, tetradecanoyl, hexadecanoyl, heptadecanoyl, octadecanoyl or eicosanoyl group. Alternatively, Z¹ groups are derived from long-chain saturated α, ω-dicarboxylic acids of formula HOOC—(CH₂)₁₂₋₂₂-COOH, preferably from long-chain saturated α, ω-dicarboxylic acids having an even number of carbon atoms in the aliphatic chain.

[0509] In other words, Z¹ may be A-C₁₂₋₂₂ alkylene-(CO)—, where A is H or —COOH, and wherein the alkylene may be linear or branched and may be saturated or unsaturated, and may optionally incorporate a phenylene or piperazinylene moiety in its length.

[0510] For example, Z¹ may be:

[0511] Dodecanoyl i.e. H—(CH₂)₁₁—(CO)—;

[0512] Tetradecanoyl i.e. H—(CH₂)₁₃—(CO)—;

[0513] Hexadecanoyl, i.e. H—(CH₂)₁₅—(CO)—;

[0514] 13-carboxytridecanoyl, i.e. HOOC—(CH₂)₁₂—(CO)—;

[0515] 15-carboxypentadecanoyl, i.e. HOOC—(CH₂)₁₄—(CO)—;

[0516] 17-carboxyheptadecanoyl, i.e. HOOC—(CH₂)₁₆—(CO)—;

[0517] 19-carboxynonadecanoyl, i.e. HOOC—(CH₂)₁₈—(CO)—; or

[0518] 21-carboxyheneicosanoyl, i.e. HOOC—(CH₂)₂₀—(CO)—

[0519] The carboxylic acid, if present, may be replaced by a bioisotere, phosphate or sulfonate. Suitable bioisoteres for carboxylic acids are known in the art and include tetrazole, acylsulfomides, acylhydroxylamine, and squaric acid derivatives.

[0520] As mentioned above, the lipophilic substituent Z¹ may be conjugated to the amino acid side chain or N-terminal nitrogen by one or more spacers Z².

[0521] When present, the spacer is attached to the lipophilic substituent and to the amino acid side chain or N-terminal nitrogen. The spacer may be attached to the lipophilic substituent and to the amino acid side chain independently by an ester, a sulphonyl ester, a thioester, an amide or a sulphonamide. Accordingly, it may include two moieties independently selected from acyl, sulphonyl, an N atom, an O atom or an S atom. The spacer may consist of a linear C₁₋₁₀ hydrocarbon chain or more preferably a linear C₁₋₅ hydrocarbon chain. Furthermore the spacer can be substituted with one or more substituents selected from C₁₋₆ alkyl, C₁₋₆ alkyl amine, C₁₋₆ alkyl hydroxy and C₁₋₆ alkyl carboxy.

[0522] The spacer may be, for example, a residue of any naturally occurring or unnatural amino acid. For example, the spacer may be a residue of Gly, Pro, Ala, Val, Leu, lLe, Met, Cys, Phe, Tyr, Trp, His, Lys, Arg, Gln, Asn, Glu, Asp, γ-Glu, β-Asp, ε-Lys, Asp, Ser, Thr, Dapa, Gaba, Aib, β-Ala (i.e., 3-aminopropanoyl), 4-aminobutanoyl, 5-aminopentanoyl, 6-aminohexanoyl, 7-aminoheptanoyl, 8-aminooctanoyl, 9-aminononanoyl, 10-aminodecanoyl, 8-amino-3,6-dioxaoctanoyl. In certain embodiments, the spacer is a residue of Glu, γ-Glu, ε-Lys, β-Ala (i.e., 3-aminopropanoyl), 4-aminobutanoyl, 8-aminooctanoyl or 8-amino-3,6-dioxaoctanoyl (Peg3), 11-amino-3,6,9-trioxaundecanoic acid (Peg4) or (piperazine-1-yl)-carboxylic acid. In the present invention, γGlu and isoGlu are used interchangeably.

[0523] Z² is suitably a sequence of 1 to 6 residues of compounds selected from γGlu, βAsp, D, E, K, Orn, S, T, A, βAla, G, P, V, L, I, Y, Q, N, Dapa, Gaba, or Aib, or a corresponding D form thereof, 5-aminopentanoyl, 6-aminohexanoyl, 7-aminoheptanoyl, 8-aminooctanoyl, 9-aminononanoyl, and 10-aminodecanoyl. 8-amino-3,6-dioxaoctanoic acid (Peg3), 11-amino-3,6,9-trioxaundecanoic acid (Peg4) or (piperazine-1-yl)-carboxylic acid.

[0524] For example, Z² may be, or may comprise:

[0525] [γGlu];

[0526] [γGlu][Peg3][Peg3]-;

[0527] [(Piperazine-1-yl)-acetyl][Peg3][Peg3];

[0528] [γGlu]-G-[γGlu];

[0529] [γGlu]-K-[γGlu];

[0530] [γGlu]-KG-[γGlu]; or

[0531] [γGlu]-G-[Peg3][γGlu][Peg3].

[0532] Z² is suitably bound at each side by amide linkage. Other suitable linkages may be used, with the commensurate atom replacement; for example sulfinamide, sulfonamide, or ester linkages or amino, ether, or thioether linkages are envisaged.

[0533] In other words, in some aspects the lipophilic group Φ is Z¹- or Z¹-Z²—; wherein

[0534] Z¹ is A-C₁₂₋₂₂ alkylene-(CO)—;

[0535] where A is H or —COOH, and wherein the alkylene may be linear or branched and may be saturated or unsaturated, and may optionally incorporate a phenylene or piperazinylene moiety in its length; and

[0536] Z² is a sequence of 1 to 6 of residues of compounds selected from γ-Glu, βAsp, D, E, K, Orn, S, T, A, β-Ala, G, P, V, L, I, Y, Q, N, Dapa, Gaba, or Aib, or a corresponding D form thereof, 5-aminopentanoyl, 6-aminohexanoyl, 7-aminoheptanoyl, 8-aminooctanoyl, 9-aminononanoyl, and 10-aminodecanoyl. 8-amino-3,6-dioxaoctanoic acid (Peg3), 11-amino-3,6,9-trioxaundecanoic acid (Peg4) or (piperazine-1-yl)-carboxylic acid, e.g. a linker selected from

[0537] [Glu],

[0538] [γGlu][Peg3][Peg3]-;

[0539] [(Piperazine-1-yl)-acetyl][Peg3][Peg3];

[0540] [γGlu]-G-[γGlu];

[0541] [γGlu)-K-[γGlu];

[0542] [γGlu]-KG-[γGlu]; and

[0543] [γGlu]-G-[Peg3][γGlu][Peg3].

[0544] The amino acid side chain to which the lipophilic substituent is conjugated typically includes a carboxy, hydroxyl, thiol, amide or amine group, for forming an ester, a sulphonyl ester, a thioester, an amide, or a sulphonamide with the spacer or lipophilic substituent. An amide linkage may be particularly preferred, and thus the amino acid may be any amino acid having an amine group in its side chain, although it will be clear that side chains having other functional groups are contemplated. Thus, the amino acid side chain may be a side chain of a Glu, Lys, Ser, Cys, Dbu, Dpr or Orn residue. For example, it may be a side chain of a Lys, Glu or Cys residue. Where two or more side chains carry a lipophilic substituent, they may be independently selected from those residues.

[0545] Typically, the amino acid side chain is a side chain of a Lys residue.

[0546] An example of a lipophilic substituent comprising a lipophilic moiety Z¹ and spacer Z² is shown in the formula below:

[chemical structure]

[0547] Here, the side chain of a Lys residue is covalently attached to a γGlu spacer (Z²) via an amide linkage. A hexadecanoyl group (Z¹) is covalently attached to the γGlu spacer via an amide linkage. This combination of lipophilic moiety and spacer, conjugated to a Lys residue, may be referred to by the short-hand notation K(Hexadecanoyl-γGlu), e.g., when shown in formulae of specific compounds. γGlu can also be referred to as isoGlu, and a hexadecanoyl group as a palmitoyl group. Thus it will be apparent that the notation (Hexadecanoyl-γGlu) is equivalent to the notations (isoGlu(Palm)) or (isoGlu(Palmitoyl)) as used for example in PCT/GB2008/004121.

[0548] Alternative Z¹ groups are derived from long-chain saturated α, ω-dicarboxylic acids of formula HOOC—(CH₂)₁₂₋₂₂—COOH as exemplified below

[chemical structure]

[0549] Here, the side chain of a Lys residue is covalently attached to a γGlu spacer (Z²) via an amide linkage. A 15-carboxypentadecanoyl group (Z¹) is covalently attached to the γGlu spacer via an amide linkage. This combination of lipophilic moiety and spacer, conjugated to a Lys residue, may be referred to by the short-hand notation K(15-carboxypentadecanoyl-γ-Glu), e.g., when shown in formulae of specific compounds. γGlu can also be referred to as isoGlu.

[0550] Certain preferred Φ groups (Z¹- and Z¹—Z²—) include:

[0551] [15-carboxy-pentadecanoyl];

[0552] [15-carboxy-pentadecanoyl][γGlu],

[0553] [15-carboxy-pentadecanoyl][γGlu][Peg3][Peg3];

[0554] [19-carboxy-nonadecanoyl][γGlu][Peg3][Peg3];

[0555] [15-carboxy-pentadecanoyl][(Piperazine-1-yl)-acetyl][Peg3][Peg3];

[0556] [17-carboxy-heptadecanoyl][γGlu]G[γGlu];

[0557] [17-carboxy-heptadecanoyl][γGlu]K[γGlu];

[0558] [17-carboxy-heptadecanoyl][γGlu]KG[γGlu];

[0559] [17-carboxy-heptadecanoyl][γGlu]G[Peg3][γGlu][Peg3];

[0560] [15-carboxy-pentadecanoyl][γGlu]G[γGlu];

[0561] [17-carboxy-heptadecanoyl];

[0562] [17-carboxy-heptadecanoyl][γGlu]

[0563] [19-carboxy-nonadecanoyl][γGlu]G[γGlu]; and

[0564] [17-carboxy-heptadecanoyl][γGlu][Peg3][Peg3].

[0565] Illustrative structures of Φ groups (Z¹— and Z¹—Z²—) are shown below, where the wavy line indicates the linkage to the peptide (to an amino acid side chain, N-terminal nitrogen, or C-terminal carbon):

[chemical structure]

[chemical structure]

[0566] The skilled person will be well aware of suitable techniques for preparing the compounds employed in the context of the invention. For examples of suitable chemistry, see WO98/08871, WO00/55184, WO00/55119, Madsen et al., J. Med. Chem. 50:6126-32 (2007), and Knudsen et al., J. Med Chem. 43:1664-1669 (2000), incorporated herein by reference.

[0567] In some embodiments, the compstatin analogue has a lipophilic group Φ as described above conjugated to an amino acid at one or more of positions corresponding to positions 1, 3, 4, 5, 6, 7, 8, 9, 10, 11 or 13 of the compstatin-like sequence, i.e. positions X1-X13.

[0568] In certain embodiments, the compstatin analogue has a lipophilic substituent as described above conjugated to an amino acid at one or more of positions corresponding to positions X1, X11 or X13, or to an amino acid within R1 or R2, or at the N-terminus as group Y1.

[0569] For C-terminal acylation or lipidation of peptides, well-established conjugation strategies have been developed. For example, such conjugation could be performed by click chemistry (i.e. the biorthogonal azide-alkyne conjugation reaction catalyzed by Cu(l)) or by other conjugation strategies known to the person skilled in the art of peptide chemistry.

[0570] The compstatin analogue may comprise one of the following sequences:

[0571] I-X2-IWQDWGAHR-X12-T

[0572] I-X2-IWQDWGEHR-X12-T

[0573] ESSAI-X2-IWQDWGEHR-X12-T

[0574] I-X2-l[1 MeTrp]QDWGEHR-X12-T

[0575] I-X2-IWQDWGKHR-X12-T

[0576] I-X2-IWQDWGSHR-X12-T

[0577] I-X2-IWQKWGEHR-X12-T

[0578] I-X2-IWQKWGAHR-X12-TGAES

[0579] Y-X2-IWQDWGEHR-X12-T

[0580] ESSAY-X2-IWQDWGEHR-X12-T

[0581] [Sar]-X2-IWQDWGEHR-X12-T

[0582] I-X2-IWQDWGAHR-X12-E

[0583] I-X2-IWQDWGEHR-X12-[Sar]

[0584] ESSAI-X2-IWQDWGEHR-X12-TGAES

[0585] I-X2-IWQDWGEHR-X12-TGAES

[0586] I-X2-IWQEWGEHR-X12-T

[0587] I-X2-IWQDWGDHR-X12-T

[0588] I-X2-IWQDWGRHR-X12-T

[0589] I-X2-IWQDWGAHS-X12-T

[0590] I-X2-IWQDWGEHS-X12-T

[0591] I-X2-IWQDWGEHR-X12-S

[0592] I-X2-IWQDWGEHR-X12-E

[0593] F-X2-IWQDWGEHR-X12-T

[0594] I-X2-IWQDWGEHR-X12-TEGE

[0595] I-X2-IWQDWGEHR-X12-TEA

[0596] I-X2-IWQDWGEHR-X12-TE

[0597] I-X2-IWQDWGEHR-X12-EGE

[0598] EGSAI-X2-IWQDWGEHR-X12-[Sar]E

[0599] EGSAI-X2-IWQDWGEHR-X12-T

[0600] EGEI-X2-IWQDWGEHR-X12-T

[0601] ESEI-X2-IWQDWGEHR-X12-T

[0602] SEI-X2-IWQDWGEHR-X12-TEA

[0603] EI-X2-IWQDWGEHR-X12-TE

[0604] EI-X2-IWQDWGEHR-X12-TEGE

[0605] EGEI-X2-IWQDWGEHR-X12-EGE

[0606] ESEI-X2-IWQDWGEHR-X12-EGE

[0607] KEKI-X2-IWQDWGEHR-X12-TEKE

[0608] EKGI-X2-IWQDWGEHR-X12-TEKP

[0609] I-X2-IWQDWGEHR-X12-TEGK

[0610] GSAI-X2-IWQDWGEHR-X12-[Sar]E

[0611] SAI-X2-IWQDWGEHR-X12-[Sar]E

[0612] SAI-X2-IWQDWGEHR-X12-TEG

[0613] F-X2-IWQDWGEHR-X12-TGAE

[0614] EGSAI-X2-IWQDWGEHR-X12-[Sar]EGE

[0615] EGSAF-X2-IWQDWGEHR-X12-[Sar]E

[0616] ESSAI-X2-IWQDWGAHR-X12-T

[0617] I-X2-IWQDWGAHR-X12-TGAES

[0618] {d}YI-X2-1[1-Me-Trp]QDW[Sar]AHR-X12-[N-Me-Ile]

[0619] EGSAI-X2-1[1-Me-Trp]QDWGEHR-X12-[Sar]E

[0620] EGSAI-X2-1[2-Nal]QDWGEHR-X12-[Sar]E

[0621] I-X2-1[1-Me-Trp]QDWGEHR-X12-TGAES

[0622] I-X2-1[2-Nal]QDWGEHR-X12-TGAES

[0623] EGSAF-X2-1[1-Me-Trp]QDWGEHR-X12-[Sar]E

[0624] EGSAY-X2-1[1-Me-Trp]QDWGEHR-X12-[Sar]E

[0625] EGSAI-X2-IWQDWGEHR-X12-TE

[0626] EGSAF-X2-1[1-Nal]QDWGEHR-X12-TE

[0627] EGSAF-X2-1[1-Me-Trp]QDWGEHR-X12-TE

[0628] EGSAF-X2-1[1-Me-Trp]QDWGEHR-X12-EGE

[0629] EGSAY-X2-1[1-Me-Trp]QDWGEHR-X12-TE

[0630] EGSAF-X2-1[2-Nal]QDWGEHR-X12-TE

[0631] F-X2-1[1-Me-Trp]QDWGEHR-X12-TGAES

[0632] Y-X2-1[1-Me-Trp]QDWGEHR-X12-TGAES

[0633] F-X2-1[1-Nal]QDWGEHR-X12-TGAES

[0634] F-X2-1[2-Nal]QDWGEHR-X12-TGAES

[0635] Y-X2-1[2-Nal]QDWGEHR-X12-TGAES

[0636] Y-X2-IWQDWGEHR-X12-TGAES

[0637] SEF-X2-1[1-Me-Trp]QDWGEHR-X12-TGAES

[0638] Y-X2-l[1-Me-Trp]QDWGEHR-X12-TEAGS

[0639] Y-X2-l[1-Me-Trp]QDWGEHR-X12-TESGA

[0640] EGSAY-X2-l[1-Me-Trp]QEWGEHR-X12-[Sar]E

[0641] SEY-X2-l[1-Me-Trp]QDWGEHR-X12-[Sar]EA

[0642] F-X2-1[1-Me-Trp]QDW[Sar]EHR-X12-TGAES

[0643] {d}YF-X2-1[1-Me-Trp]QDW[Sar]EHR-X12-TGAES

[0644] SEF-X2-1[1-Me-Trp]QDWGEHR-X12-[Sar]GAES

[0645] SEF-X2-1[1-Me-Trp]QDWGEHR-X12-[Sar]EA

[0646] SEF-X2-l[1-Me-Trp]QDW[Sar]EHR-X12-[Sar]EA

[0647] SEF-X2-l[1-Me-Trp]QDW[Sar]EHR-X12-TEA

[0648] SEF-X2-l[1-Me-Trp]QDWGEHR-X12-[Sar]E

[0649] SEF-X2-l[1-Me-Trp]QDW[Sar]EHR-X12-[Sar]E

[0650] EF-X2-l[1-Me-Trp]QDWGEHR-X12-[Sar]EA

[0651] SE[Sar]-X2-l[1-Me-Trp]QDWGEHR-X12-[Sar]EA

[0652] SE[Sar]-X2-l[1-Me-Trp]QDWGEHR-X12-TEA

[0653] SEF-X2-l[1-Me-Trp]QEWGEHR-X12-[Sar]EA

[0654] SEF-X2-l[1-Me-Trp]QDWGEHR-X12-SEA

[0655] EF-X2-l[1-Me-Trp]QDWGEHR-X12-ES

[0656] SEF-X2-1[1-Me-Trp]QDWGEHK-X12-[Sar]EA

[0657] GEF-X2-l[1-Me-Trp]QDWGEHR-X12-[Sar]EA

[0658] GE[Sar]-X2-l[1-Me-Trp]QDWGEHR-X12-TEA

[0659] SE[Sar]-X2-l[1-Me-Trp]QEW[Sar]EHR-X12-TEA

[0660] SE[Sar]-X2-l[1-Me-Trp]QEWGEHR-X12-[Sar]EA

[0661] {d}Y[Sar]-X2-l[1-Me-Trp]QDWGEHR-X12-TEA

[0662] wherein X2 and X12 are residues whose side chains are linked by a thioether bond.

[0663] For example, the compstatin analogue may comprise one of the following sequences:

[0664] IhC(1)IWQDWGAHRA(1)T

[0665] IhC(1)IWQDWGEHRA(1)T

[0666] ESSAIhC(1)IWQDWGEHRA(1)T

[0667] IhC(1)I[1MeTrp]QDWGEHRA(1)T

[0668] IhC(1)IWQDWGKHRA(1)T

[0669] IhC(1)IWQDWGSHRA(1)T

[0670] IhC(1)IWQKWGEHRA(1)T

[0671] IhC(1)IWQKWGAHRA(1)TGAES

[0672] YhC(1)IWQDWGEHRA(1)T

[0673] ESSAYhC(1)IWQDWGEHRA(1)T

[0674] [Sar]hC(1)IWQDWGEHRA(1)T

[0675] IhC(1)IWQDWGAHRA(1)E

[0676] IhC(1)IWQDWGEHRA(1)[Sar]

[0677] ESSAIhC(1)IWQDWGEHRA(1)TGAES

[0678] IhC(1)IWQDWGEHRA(1)TGAES

[0679] IhC(1)IWQEWGEHRA(1)T

[0680] IhC(1)IWQDWGDHRA(1)T

[0681] IhC(1)IWQDWGRHRA(1)T

[0682] IhC(1)IWQDWGAHSA(1)T

[0683] IhC(1)IWQDWGEHSA(1)T

[0684] IhC(1)IWQDWGEHRA(1)S

[0685] IhC(1)IWQDWGEHRA(1)E

[0686] FhC(1)IWQDWGEHRA(1)T

[0687] IhC(1)IWQDWGEHRA(1)TEGE

[0688] IhC(1)IWQDWGEHRA(1)TEA

[0689] IhC(1)IWQDWGEHRA(1)TE

[0690] IhC(1)IWQDWGEHRA(1)EGE

[0691] EGSAIhC(1)IWQDWGEHRA(1)[Sar]E

[0692] EGSAIhC(1)IWQDWGEHRA(1)T

[0693] EGEIhC(1)IWQDWGEHRA(1)T

[0694] ESEIhC(1)IWQDWGEHRA(1)T

[0695] SEIhC(1)IWQDWGEHRA(1)TEA

[0696] EIhC(1)IWQDWGEHRA(1)TE

[0697] EIhC(1)IWQDWGEHRA(1)TEGE

[0698] EGEIhC(1)IWQDWGEHRA(1)EGE

[0699] ESEIhC(1)IWQDWGEHRA(1)EGE

[0700] KEKIhC(1)IWQDWGEHRA(1)TEKE

[0701] EKGIhC(1)IWQDWGEHRA(1)TEKP

[0702] IhC(1)IWQDWGEHRA(1)TEGK

[0703] GSAIhC(1)IWQDWGEHRA(1)[Sar]E

[0704] SAIhC(1)IWQDWGEHRA(1)[Sar]E

[0705] SAIhC(1)IWQDWGEHRA(1)TEG

[0706] FhC(1)IWQDWGEHRA(1)TGAE

[0707] EGSAIhC(1)IWQDWGEHRA(1)[Sar]EGE

[0708] EGSAFhC(1)IWQDWGEHRA(1)[Sar]E

[0709] ESSAIhC(1)IWQDWGAHRA(1)T

[0710] IhC(1)IWQDWGAHRA(1)TGAES

[0711] {d}YIhC(1)1[1-Me-Trp]QDW[Sar]AHRA(1)-[N-Me-Ile]

[0712] EGSAIhC(1)I[1-Me-Trp]QDWGEHRA(1)[Sar]E

[0713] EGSAIhC(1)I[2-Nal]QDWGEHRA(1)[Sar]E

[0714] IhC(1)I[1-Me-Trp]QDWGEHRA(1)TGAES

[0715] IhC(1)I[2-Nal]QDWGEHRA(1)TGAES

[0716] EGSAFhC(1)I[1-Me-Trp]QDWGEHRA(1)[Sar]E

[0717] EGSAYhC(1)I[1-Me-Trp]QDWGEHRA(1)[Sar]E

[0718] EGSAIhC(1)IWQDWGEHRA(1)TE

[0719] EGSAFhC(1)1[1-Nal]QDWGEHRA(1)TE

[0720] EGSAFhC(1)1[1-Me-Trp]QDWGEHRA(1)TE

[0721] EGSAFhC(1)1[1-Me-Trp]QDWGEHRA(1)EGE

[0722] EGSAYhC(1)1[1-Me-Trp]QDWGEHRA(1)TE

[0723] EGSAFhC(1)1[2-Nal]QDWGEHRA(1)TE

[0724] FhC(1)I[1-Me-Trp]QDWGEHRA(1)TGAES

[0725] YhC(1)I[1-Me-Trp]QDWGEHRA(1)TGAES

[0726] FhC(1)1[1-Nal]QDWGEHRA(1)TGAES

[0727] FhC(1)I[2-Nal]QDWGEHRA(1)TGAES

[0728] YhC(1)1[2-Nal]QDWGEHRA(1)TGAES

[0729] YhC(1)IWQDWGEHRA(1)TGAES

[0730] SEFhC(1)1[1-Me-Trp]QDWGEHRA(1)TGAES

[0731] YhC(1)I[1-Me-Trp]QDWGEHRA(1)TEAGS

[0732] YhC(1)I[1-Me-Trp]QDWGEHRA(1)TESGA

[0733] EGSAYhC(1)I[1-Me-Trp]QEWGEHRA(1)[Sar]E

[0734] SEYhC(1)I[1-Me-Trp]QDWGEHRA(1)[Sar]EA

[0735] FhC(1)1[1-Me-Trp]QDW[Sar]EHRA(1)TGAES

[0736] {d}YFhC(1)1[1-Me-Trp]QDW[Sar]EHRA(1)TGAES

[0737] SEFhC(1)1[1-Me-Trp]QDWGEHRA(1)[Sar]GAES

[0738] SEFhC(1)1[1-Me-Trp]QDWGEHRA(1)[Sar]EA

[0739] SEFhC(1)1[1-Me-Trp]QDW[Sar]EHRA(1)[Sar]EA

[0740] SEFhC(1)1[1-Me-Trp]QDW[Sar]EHRA(1)TEA

[0741] SEFhC(1)1[1-Me-Trp]QDWGEHRa(1)[Sar]E

[0742] SEFhC(1)1[1-Me-Trp]QDW[Sar]EHRA(1)[Sar]E

[0743] EFhC(1)1[1-Me-Trp]QDWGEHRA(1)[Sar]EA

[0744] SE[Sar]hC(1)I[1-Me-Trp]QDWGEHRA(1)[Sar]EA

[0745] SE[Sar]hC(1)I[1-Me-Trp]QDWGEHRA(1)TEA

[0746] SEFhC(1)1[1-Me-Trp]QEWGEHRA(1)[Sar]EA

[0747] SEFhC(1)l[1-Me-Trp]QDWGEHRA(1)SEA

[0748] EFhC(1)I[1-Me-Trp]QDWGEHRA(1)ES

[0749] SEFhC(1)1[1-Me-Trp]QDWGEHKA(1)[Sar]EA

[0750] GEFhC(1)l[1-Me-Trp]QDWGEHRA(1)[Sar]EA

[0751] GE[Sar]hC(1)I[1-Me-Trp]QDWGEHRA(1)TEA

[0752] SE[Sar]hC(1)l[1-Me-Trp]QEW[Sar]EHRA(1)TEA

[0753] SE[Sar]hC(1)1[1-Me-Trp]QEWGEHRA(1)[Sar]EA

[0754] {d}Y[Sar]hC(1)I[1-Me-Trp]QDWGEHRA(1)TEA

[0755] wherein the side chains of residues designated hC(1) and A(1) form a cystathionine bridge.

[0756] The compstatin analogue may comprise one of the following sequences:

[0757] IA(1)IWQDWGAHRhC(1)T

[0758] IA(1)IWQDWGEHRhC(1)T

[0759] ESSAIA(1)IWQDWGEHRhC(1)T

[0760] IA(1)I[1 MeTrp]QDWGEHRhC(1)T

[0761] IA(1)IWQDWGKHRhC(1)T

[0762] IA(1)IWQDWGSHRhC(1)T

[0763] IA(1)IWQKWGEHRhC(1)T

[0764] IA(1)IWQKWGAHRhC(1)TGAES

[0765] YA(1)IWQDWGEHRhC(1)T

[0766] ESSAYA(1)IWQDWGEHRhC(1)T

[0767] [Sar]A(1)IWQDWGEHRhC(1)T

[0768] IA(1)IWQDWGAHRhC(1)E

[0769] IA(1)IWQDWGEHRhC(1)[Sar]

[0770] ESSAIA(1)IWQDWGEHRhC(1)TGAES

[0771] IA(1)IWQDWGEHRhC(1)TGAES

[0772] IA(1)IWQEWGEHRhC(1)T

[0773] IA(1)IWQDWGDHRhC(1)T

[0774] IA(1)IWQDWGRHRhC(1)T

[0775] IA(1)IWQDWGAHShC(1)T

[0776] IA(1)IWQDWGEHShC(1)T

[0777] IA(1)IWQDWGEHRhC(1)S

[0778] IA(1)IWQDWGEHRhC(1)E

[0779] FA(1)IWQDWGEHRhC(1)T

[0780] IA(1)IWQDWGEHRhC(1)TEGE

[0781] IA(1)IWQDWGEHRhC(1)TEA

[0782] IA(1)IWQDWGEHRhC(1)TE

[0783] IA(1)IWQDWGEHRhC(1)EGE

[0784] EGSAIA(1)IWQDWGEHRhC(1)[Sar]E

[0785] EGSAIA(1)IWQDWGEHRhC(1)T

[0786] EGEIA(1)IWQDWGEHRhC(1)T

[0787] ESEIA(1)IWQDWGEHRhC(1)T

[0788] SEIA(1)IWQDWGEHRhC(1)TEA

[0789] EIA(1)IWQDWGEHRhC(1)TE

[0790] EIA(1)IWQDWGEHRhC(1)TEGE

[0791] EGEIA(1)IWQDWGEHRhC(1)EGE

[0792] ESEIA(1)IWQDWGEHRhC(1)EGE

[0793] KEKIA(1)IWQDWGEHRhC(1)TEKE

[0794] EKGIA(1)IWQDWGEHRhC(1)TEKP

[0795] IA(1)IWQDWGEHRhC(1)TEGK

[0796] GSAIA(1)IWQDWGEHRhC(1)[Sar]E

[0797] SAIA(1)IWQDWGEHRhC(1)[Sar]E

[0798] SAIA(1)IWQDWGEHRhC(1)TEG

[0799] FA(1)IWQDWGEHRhC(1)TGAE

[0800] EGSAIA(1)IWQDWGEHRhC(1)[Sar]EGE

[0801] EGSAFA(1)IWQDWGEHRhC(1)[Sar]E

[0802] ESSAIA(1)IWQDWGAHRhC(1)T

[0803] IA(1)IWQDWGAHRhC(1)TGAES

[0804] {d}YIA(1)I[1-Me-Trp]QDW[Sar]AHRhC(1)-[N-Me-lie]

[0805] EGSAIA(1)1[1-Me-Trp]QDWGEHRhC(1)[Sar]E

[0806] EGSAIA(1)1[2-Nal]QDWGEHRhC(1)[Sar]E

[0807] IA(1)1[1-Me-Trp]QDWGEHRhC(1)TGAES

[0808] IA(1)I[2-Nal]QDWGEHRhC(1)TGAES

[0809] EGSAFA(1)I[1-Me-Trp]QDWGEHRhC(1)[Sar]E

[0810] EGSAYA(1)I[1-Me-Trp]QDWGEHRhC(1)[Sar]E

[0811] EGSAIA(1)IWQDWGEHRhC(1)TE

[0812] EGSAFA(1)l[1-Nal]QDWGEHRhC(1)TE

[0813] EGSAFA(1)1[1-Me-Trp]QDWGEHRhC(1)TE

[0814] EGSAFA(1)1[1-Me-Trp]QDWGEHRhC(1)EGE

[0815] EGSAYA(1)1[1-Me-Trp]QDWGEHRhC(1)TE

[0816] EGSAFA(1)l[2-Nal]QDWGEHRhC(1)TE

[0817] FA(1)1[1-Me-Trp]QDWGEHRhC(1)TGAES

[0818] YA(1)I[1-Me-Trp]QDWGEHRhC(1)TGAES

[0819] FA(1)1[1-Nal]QDWGEHRhC(1)TGAES

[0820] FA(1)I[2-Nal]QDWGEHRhC(1)TGAES

[0821] YA(1)1[2-Nal]QDWGEHRhC(1)TGAES

[0822] YA(1)IWQDWGEHRhC(1)TGAES

[0823] SEFA(1)l[1-Me-Trp]QDWGEHRhC(1)TGAES

[0824] YA(1)1[1-Me-Trp]QDWGEHRhC(1)TEAGS

[0825] YA(1)1[1-Me-Trp]QDWGEHRhC(1)TESGA

[0826] EGSAYA(1)1[1-Me-Trp]QEWGEHRhC(1)[Sar]E

[0827] SEYA(1)1[1-Me-Trp]QDWGEHRhC(1)[Sar]EA

[0828] FA(1)1[1-Me-Trp]QDW[Sar]EHRhC(1)TGAES

[0829] {d}YFA(1)I[1-Me-Trp]QDW[Sar]EHRhC(1)TGAES

[0830] SEFA(1)I[1-Me-Trp]QDWGEHRhC(1)[Sar]GAES

[0831] SEFA(1)1[1-Me-Trp]QDWGEHRhC(1)[Sar]EA

[0832] SEFA(1)1[1-Me-Trp]QDW[Sar]EHRhC(1)[Sar]EA

[0833] SEFA(1)1[1-Me-Trp]QDW[Sar]EHRhC(1)TEA

[0834] SEFA(1)1[1-Me-Trp]QDWGEHRhC(1)[Sar]E

[0835] SEFA(1)I[1-Me-Trp]QDW[Sar]EHRhC(1)[Sar]E

[0836] EFA(1)1[1-Me-Trp]QDWGEHRhC(1)[Sar]EA

[0837] SE[Sar]A(1)1[1-Me-Trp]QDWGEHRhC(1)[Sar]EA

[0838] SE[Sar]A(1)l[1-Me-Trp]QDWGEHRhC(1)TEA

[0839] SEFA(1)1[1-Me-Trp]QEWGEHRhC(1)[Sar]EA

[0840] SEFA(1)l[1-Me-Trp]QDWGEHRhC(1)SEA

[0841] EFA(1)1[1-Me-Trp]QDWGEHRhC(1)ES

[0842] SEFA(1)1[1-Me-Trp]QDWGEHKhC(1)[Sar]EA

[0843] GEFA(1)l[1-Me-Trp]QDWGEHRhC(1)[Sar]EA

[0844] GE[Sar]A(1)1[1-Me-Trp]QDWGEHRhC(1)TEA

[0845] SE[Sar]A(1)l[1-Me-Trp]QEW[Sar]EHRhC(1)TEA

[0846] SE[Sar]A(1)1[1-Me-Trp]QEWGEHRhC(1)[Sar]EA

[0847] {d}Y[Sar]A(1)1[1-Me-Trp]QDWGEHRhC(1)TEA

[0848] wherein the side chains of residues designated A(1) and hC(1) form a cystathionine bridge.

[0849] The compstatin analogue may comprise one of the following sequences:

[0850] IC(1)IWQDWGAHRA(1)T

[0851] IC(1)IWQDWGEHRA(1)T

[0852] ESSAIC(1)IWQDWGEHRA(1)T

[0853] IC(1)l[1MeTrp]QDWGEHRA(1)T

[0854] IC(1)IWQDWGKHRA(1)T

[0855] IC(1)IWQDWGSHRA(1)T

[0856] IC(1)IWQKWGEHRA(1)T

[0857] IC(1)IWQKWGAHRA(1)TGAES

[0858] YC(1)IWQDWGEHRA(1)T

[0859] ESSAYC(1)IWQDWGEHRA(1)T

[0860] [Sar]C(1)IWQDWGEHRA(1)T

[0861] IC(1)IWQDWGAHRA(1)E

[0862] IC(1)IWQDWGEHRA(1)[Sar]

[0863] ESSAIC(1)IWQDWGEHRA(1)TGAES

[0864] IC(1)IWQDWGEHRA(1)TGAES

[0865] IC(1)IWQEWGEHRA(1)T

[0866] IC(1)IWQDWGDHRA(1)T

[0867] IC(1)IWQDWGRHRA(1)T

[0868] IC(1)IWQDWGAHSA(1)T

[0869] IC(1)IWQDWGEHSA(1)T

[0870] IC(1)IWQDWGEHRA(1)S

[0871] IC(1)IWQDWGEHRA(1)E

[0872] FC(1)IWQDWGEHRA(1)T

[0873] IC(1)IWQDWGEHRA(1)TEGE

[0874] IC(1)IWQDWGEHRA(1)TEA

[0875] IC(1)IWQDWGEHRA(1)TE

[0876] IC(1)IWQDWGEHRA(1)EGE

[0877] EGSAIC(1)IWQDWGEHRA(1)[Sar]E

[0878] EGSAIC(1)IWQDWGEHRA(1)T

[0879] EGEIC(1)IWQDWGEHRA(1)T

[0880] ESEIC(1)IWQDWGEHRA(1)T

[0881] SEIC(1)IWQDWGEHRA(1)TEA

[0882] EIC(1)IWQDWGEHRA(1)TE

[0883] EIC(1)IWQDWGEHRA(1)TEGE

[0884] EGEIC(1)IWQDWGEHRA(1)EGE

[0885] ESEIC(1)IWQDWGEHRA(1)EGE

[0886] KEKIC(1)IWQDWGEHRA(1)TEKE

[0887] EKGIC(1)IWQDWGEHRA(1)TEKP

[0888] IC(1)IWQDWGEHRA(1)TEGK

[0889] GSAIC(1)IWQDWGEHRA(1)[Sar]E

[0890] SAIC(1)IWQDWGEHRA(1)[Sar]E

[0891] SAIC(1)IWQDWGEHRA(1)TEG

[0892] FC(1)IWQDWGEHRA(1)TGAE

[0893] EGSAIC(1)IWQDWGEHRA(1)[Sar]EGE

[0894] EGSAFC(1)IWQDWGEHRA(1)[Sar]E

[0895] ESSAIC(1)IWQDWGAHRA(1)T

[0896] IC(1)IWQDWGAHRA(1)TGAES

[0897] {d}YIC(1)1[1-Me-Trp]QDW[Sar]AHRA(1)-[N-Me-Ile]

[0898] EGSAIC(1)1[1-Me-Trp]QDWGEHRA(1)[Sar]E

[0899] EGSAIC(1)1[2-Nal]QDWGEHRA(1)[Sar]E

[0900] IC(1)1[1-Me-Trp]QDWGEHRA(1)TGAES

[0901] IC(1)1[2-Nal]QDWGEHRA(1)TGAES

[0902] EGSAFC(1)1[1-Me-Trp]QDWGEHRA(1)[Sar]E

[0903] EGSAYC(1)1[1-Me-Trp]QDWGEHRA(1)[Sar]E

[0904] EGSAIC(1)IWQDWGEHRA(1)TE

[0905] EGSAFC(1)1[1-Nal]QDWGEHRA(1)TE

[0906] EGSAFC(1)1[1-Me-Trp]QDWGEHRA(1)TE

[0907] EGSAFC(1)1[1-Me-Trp]QDWGEHRA(1)EGE

[0908] EGSAYC(1)1[1-Me-Trp]QDWGEHRA(1)TE

[0909] EGSAFC(1)1[2-Nal]QDWGEHRA(1)TE

[0910] FC(1)I[1-Me-Trp]QDWGEHRA(1)TGAES

[0911] YC(1)l[1-Me-Trp]QDWGEHRA(1)TGAES

[0912] FC(1)I[1-Nal]QDWGEHRA(1)TGAES

[0913] FC(1)1[2-Nal]QDWGEHRA(1)TGAES

[0914] YC(1)I[2-Nal]QDWGEHRA(1)TGAES

[0915] YC(1)IWQDWGEHRA(1)TGAES

[0916] SEFC(1)1[1-Me-Trp]QDWGEHRA(1)TGAES

[0917] YC(1)I[1-Me-Trp]QDWGEHRA(1)TEAGS

[0918] YC(1)1[1-Me-Trp]QDWGEHRA(1)TESGA

[0919] EGSAYC(1)1[1-Me-Trp]QEWGEHRA(1)[Sar]E

[0920] SEYC(1)I[1-Me-Trp]QDWGEHRA(1)[Sar]EA

[0921] FC(1)1[1-Me-Trp]QDW[Sar]EHRA(1)TGAES

[0922] {d}YFC(1)1[1-Me-Trp]QDW[Sar]EHRA(1)TGAES

[0923] SEFC(1)1[1-Me-Trp]QDWGEHRA(1)[Sar]GAES

[0924] SEFC(1)I[1-Me-Trp]QDWGEHRA(1)[Sar]EA

[0925] SEFC(1)1[1-Me-Trp]QDW[Sar]EHRA(1)[Sar]EA

[0926] SEFC(1)1[1-Me-Trp]QDW[Sar]EHRA(1)TEA

[0927] SEFC(1)1[1-Me-Trp]QDWGEHRA(1)[Sar]E

[0928] SEFC(1)1[1-Me-Trp]QDW[Sar]EHRA(1)[Sar]E

[0929] EFC(1)l[1-Me-Trp]QDWGEHRA(1)[Sar]EA

[0930] SE[Sar]C(1)I[1-Me-Trp]QDWGEHRA(1)[Sar]EA

[0931] SE[Sar]C(1)I[1-Me-Trp]QDWGEHRA(1)TEA

[0932] SEFC(1)l[1-Me-Trp]QEWGEHRA(1)[Sar]EA

[0933] SEFC(1)l[1-Me-Trp]QDWGEHRA(1)SEA

[0934] EFC(1)l[1-Me-Trp]QDWGEHRA(1)ES

[0935] SEFC(1)l[1-Me-Trp]QDWGEHKA(1)[Sar]EA

[0936] GEFC(1)1[1-Me-Trp]QDWGEHRA(1)[Sar]EA

[0937] GE[Sar]C(1)l[1-Me-Trp]QDWGEHRA(1)TEA

[0938] SE[Sar]C(1)l[1-Me-Trp]QEW[Sar]EHRA(1)TEA

[0939] SE[Sar]C(1)l[1-Me-Trp]QEWGEHRA(1)[Sar]EA

[0940] {d}Y[Sar]C(1)1[1-Me-Trp]QDWGEHRA(1)TEA

[0941] wherein the side chains of residues designated C(1) and A(1) form a lanthionine bridge.

[0942] For example, the compstatin analogue may be:

[0943] Ac-IhC(1)IWQDWGAHRA(1)T-NH2 (analogue of Compound 1)

[0944] Ac-IhC(1)IWQDWGEHRA(1)T-NH2 (analogue of Compound 2)

[0945] Ac-ESSAIhC(1)IWQDWGEHRA(1)T-NH2 (analogue of Compound 3)

[0946] Ac-IhC(1)l[1-Me-Trp]QDWGEHRA(1)T-NH2 (analogue of Compound 4)

[0947] Ac-IhC(1)IWQDWGKHRA(1)T-NH2 (analogue of Compound 5)

[0948] Ac-IhC(1)IWQDWGSHRA(1)T-NH2 (analogue of Compound 6)

[0949] Ac-IhC(1)IWQKWGEHRA(1)T-NH2 (analogue of Compound 7)

[0950] Ac-IhC(1)IWQKWGAHRA(1)TGAES-NH2 (analogue of Compound 8)

[0951] Ac-YhC(1)IWQDWGEHRA(1)T-NH2 (analogue of Compound 9)

[0952] Ac-ESSAYhC(1)IWQDWGEHRA(1)T-NH2 (analogue of Compound 10)

[0953] Ac-[Sar]hC(1)IWQDWGEHRA(1)T-NH2 (analogue of Compound 11)

[0954] Ac-IhC(1)IWQDWGAHRA(1)E-NH2 (analogue of Compound 12)

[0955] Ac-IhC(1)IWQDWGEHRA(1)[Sar]-NH2 (analogue of Compound 13)

[0956] Ac-ESSAIhC(1)IWQDWGEHRA(1)TGAES-NH2 (analogue of Compound 14)

[0957] Ac-IhC(1)IWQDWGEHRA(1)TGAES-NH2 (analogue of Compound 15)

[0958] Ac-IhC(1)IWQEWGEHRA(1)T-NH2 (analogue of Compound 16)

[0959] Ac-IhC(1)IWQDWGDHRA(1)T-NH2 (analogue of Compound 17)

[0960] Ac-IhC(1)IWQDWGRHRA(1)T-NH2 (analogue of Compound 18)

[0961] Ac-IhC(1)IWQDWGAHSA(1)T-NH2 (analogue of Compound 19)

[0962] Ac-IhC(1)IWQDWGEHSA(1)T-NH2 (analogue of Compound 20)

[0963] Ac-IhC(1)IWQDWGEHRA(1)S-NH2 (analogue of Compound 21)

[0964] Ac-IhC(1)IWQDWGEHRA(1)E-NH2 (analogue of Compound 22)

[0965] Ac-FhC(1)IWQDWGEHRA(1)T-NH2 (analogue of Compound 23)

[0966] Ac-IhC(1)IWQDWGEHRA(1)TEGE-NH2 (analogue of Compound 24)

[0967] Ac-IhC(1)IWQDWGEHRA(1)TEA-NH2 (analogue of Compound 25)

[0968] Ac-IhC(1)IWQDWGEHRA(1)TE-NH2 (analogue of Compound 26)

[0969] Ac-IhC(1)IWQDWGEHRA(1)EGE-NH2 (analogue of Compound 27)

[0970] Ac-EGSAIhC(1)IWQDWGEHRA(1)[Sar]E-NH2 (analogue of Compound 28)

[0971] Ac-EGSAIhC(1)IWQDWGEHRA(1)T-NH2 (analogue of Compound 29)

[0972] Ac-EGEIhC(1)IWQDWGEHRA(1)T-NH2 (analogue of Compound 30)

[0973] Ac-ESEIhC(1)IWQDWGEHRA(1)T-NH2 (analogue of Compound 31)

[0974] Ac-SEIhC(1)IWQDWGEHRA(1)TEA-NH2 (analogue of Compound 32)

[0975] Ac-EIhC(1)IWQDWGEHRA(1)TE-NH2 (analogue of Compound 33)

[0976] Ac-EIhC(1)IWQDWGEHRA(1)TEGE-NH2 (analogue of Compound 34)

[0977] Ac-EGEIhC(1)IWQDWGEHRA(1)EGE-NH2 (analogue of Compound 35)

[0978] Ac-ESEIhC(1)IWQDWGEHRA(1)EGE-NH2 (analogue of Compound 36)

[0979] Ac-KEKIhC(1)IWQDWGEHRA(1)TEKE-NH2 (analogue of Compound 37)

[0980] Ac-EKGIhC(1)IWQDWGEHRA(1)TEKP-NH2 (analogue of Compound 38)

[0981] Ac-IhC(1)IWQDWGEHRA(1)TEGK-NH2 (analogue of Compound 39)

[0982] Ac-GSAIhC(1)IWQDWGEHRA(1)[Sar]E-NH2 (analogue of Compound 40)

[0983] Ac-SAIhC(1)IWQDWGEHRA(1)[Sar]E-NH2 (analogue of Compound 41)

[0984] Ac-SAIhC(1)IWQDWGEHRA(1)TEG-NH2 (analogue of Compound 42)

[0985] Ac-FhC(1)IWQDWGEHRA(1)TGAE-NH2 (analogue of Compound 43)

[0986] Ac-EGSAIhC(1)IWQDWGEHRA(1)[Sar]EGE-NH2 (analogue of Compound 44)

[0987] Ac-EGSAFhC(1)IWQDWGEHRA(1)[Sar]E-NH2 (analogue of Compound 45)

[0988] Ac-ESSAIhC(1)IWQDWGAHRA(1)T-NH2 (analogue of Compound 46)

[0989] Ac-IhC(1)IWQDWGAHRA(1)TGAES-NH2 (analogue of Compound 47)

[0990] H-{d}YIhC(1)l[1-Me-Trp]QDW[Sar]AHRA(1)[N-Me-lle]-NH2 (analogue of Compound 48)

[0991] Ac-EGSAIhC(1)l[1-Me-Trp]QDWGEHRA(1)[Sar]E-NH2 (analogue of Compound 49)

[0992] Ac-EGSAIhC(1)l[2-Nal]QDWGEHRA(1)[Sar]E-NH2 (analogue of Compound 50)

[0993] Ac-IhC(1)1[1-Me-Trp]QDWGEHRA(1)TGAES-NH2 (analogue of Compound 51)

[0994] Ac-IhC(1)1[2-Nal]QDWGEHRA(1)TGAES-NH2 (analogue of Compound 52)

[0995] Ac-EGSAFhC(1)1[1-Me-Trp]QDWGEHRA(1)[Sar]E-NH2 (analogue of Compound 53)

[0996] Ac-EGSAYhC(1)l[1-Me-Trp]QDWGEHRA(1)[Sar]E-NH2 (analogue of Compound 54)

[0997] Ac-EGSAIhC(1)IWQDWGEHRA(1)TE-NH2 (analogue of Compound 55)

[0998] Ac-EGSAFhC(1)1[1-Nal]QDWGEHRA(1)TE-NH2 (analogue of Compound 56)

[0999] Ac-EGSAFhC(1)1[1-Me-Trp]QDWGEHRA(1)TE-NH2 (analogue of Compound 57)

[1000] Ac-EGSAFhC(1)1[1-Me-Trp]QDWGEHRA(1)EGE-NH2 (analogue of Compound 58)

[1001] Ac-EGSAYhC(1)l[1-Me-Trp]QDWGEHRA(1)TE-NH2 (analogue of Compound 59)

[1002] Ac-EGSAFhC(1)I[2-Nal]QDWGEHRA(1)TE-NH2 (analogue of Compound 60)

[1003] Ac-FhC(1)l[1-Me-Trp]QDWGEHRA(1)TGAES-NH2 (analogue of Compound 61)

[1004] Ac-YhC(1)1[1-Me-Trp]QDWGEHRA(1)TGAES-NH2 (analogue of Compound 62)

[1005] Ac-FhC(1)I[1-Nal]QDWGEHRA(1)TGAES-NH2 (analogue of Compound 63)

[1006] Ac-FhC(1)I[2-Nal]QDWGEHRA(1)TGAES-NH2 (analogue of Compound 64)

[1007] Ac-YhC(1)I[2-Nal]QDWGEHRA(1)TGAES-NH2 (analogue of Compound 65)

[1008] Ac-YhC(1)IWQDWGEHRA(1)TGAES-NH2 (analogue of Compound 66)

[1009] Ac-SEFhC(1)1[1-Me-Trp]QDWGEHRA(1)TGAES-NH2 (analogue of Compound 67 and 151)

[1010] Ac-YhC(1)l[1-Me-Trp]QDWGEHRA(1)TEAGS-NH2 (analogue of Compound 68)

[1011] Ac-YhC(1)1[1-Me-Trp]QDWGEHRA(1)TESGA-NH2 (analogue of Compound 69)

[1012] Ac-EGSAYhC(1)1[1-Me-Trp]QEWGEHRA(1)[Sar]E-NH2 (analogue of Compound 70)

[1013] Ac-SEYhC(1)1[1-Me-Trp]QDWGEHRA(1)[Sar]EA-NH2 (analogue of Compound 71)

[1014] Ac-FhC(1)l[1-Me-Trp]QDW[Sar]EHRA(1)TGAES-NH2 (analogue of Compound 72)

[1015] H-{d}YFhC(1)1[1-Me-Trp]QDW[Sar]EHRA(1)TGAES-NH2 (analogue of Compound 73)

[1016] Ac-SEFhC(1)1[1-Me-Trp]QDWGEHRA(1)[Sar]GAES-NH2 (analogue of Compound 74)

[1017] Ac-SEFhC(1)l[1-Me-Trp]QDWGEHRA(1)[Sar]EA-NH2 (analogue of Compound 75)

[1018] Ac-SEFhC(1)1[1-Me-Trp]QDW[Sar]EHRA(1)[Sar]EA-NH2 (analogue of Compound 76)

[1019] Ac-SEFhC(1)l[1-Me-Trp]QDW[Sar]EHRA(1)TEA-NH2 (analogue of Compound 77)

[1020] Ac-SEFhC(1)l[1-Me-Trp]QDWGEHRA(1)[Sar]E-NH2 (analogue of Compound 78)

[1021] Ac-SEFhC(1)1[1-Me-Trp]QDW[Sar]EHRA(1)[Sar]E-NH2 (analogue of Compound 79)

[1022] Ac-EFhC(1)l[1-Me-Trp]QDWGEHRA(1)[Sar]EA-NH2 (analogue of Compound 80)

[1023] Ac-SE[Sar]hC(1)1[1-Me-Trp]QDWGEHRA(1)[Sar]EA-NH2 (analogue of Compound 81)

[1024] Ac-SE[Sar]hC(1)1[1-Me-Trp]QDWGEHRA(1)TEA-NH2 (analogue of Compound 82)

[1025] Ac-SEFhC(1)l[1-Me-Trp]QEWGEHRA(1)[Sar]EA-NH2 (analogue of Compound 83)

[1026] Ac-SEFhC(1)1[1-Me-Trp]QDWGEHRA(1)SEA-NH2 (analogue of Compound 84)

[1027] Ac-EFhC(1)1[1-Me-Trp]QDWGEHRA(1)ES-NH2 (analogue of Compound 85)

[1028] Ac-SEFhC(1)I[1-Me-Trp]QDWGEHKA(1)[Sar]EA-NH2 (analogue of Compound 86)

[1029] Ac-GEFhC(1)1[1-Me-Trp]QDWGEHRA(1)[Sar]EA-NH2 (analogue of Compound 87)

[1030] Ac-GE[Sar]hC(1)1[1-Me-Trp]QDWGEHRA(1)TEA-NH2 (analogue of Compound 88)

[1031] Ac-SE[Sar]hC(1)1[1-Me-Trp]QEW[Sar]EHRA(1)TEA-NH2 (analogue of Compound 89)

[1032] Ac-SE[Sar]hC(1)I[1-Me-Trp]QEWGEHRA(1)[Sar]EA-NH2 (analogue of Compound 90)

[1033] H-{d}Y[Sar]hC(1)1[1-Me-Trp]QDWGEHRA(1)TEA-NH2 (analogue of Compound 91)

[1034] wherein the side chains of residues designated hC(1) and A(1) form a cystathionine bridge.

[1035] For example, the compstatin analogue may be:

[1036] Ac-IA(1)IWQDWGAHRhC(1)T-NH2 (analogue of Compound 1)

[1037] Ac-IA(1)IWQDWGEHRhC(1)T-NH2 (analogue of Compound 2)

[1038] Ac-ESSAIA(1)IWQDWGEHRhC(1)T-NH2 (analogue of Compound 3)

[1039] Ac-IA(1)I[1-Me-Trp]QDWGEHRhC(1)T-NH2 (analogue of Compound 4)

[1040] Ac-IA(1)IWQDWGKHRhC(1)T-NH2 (analogue of Compound 5)

[1041] Ac-IA(1)IWQDWGSHRhC(1)T-NH2 (analogue of Compound 6)

[1042] Ac-IA(1)IWQKWGEHRhC(1)T-NH2 (analogue of Compound 7)

[1043] Ac-IA(1)IWQKWGAHRhC(1)TGAES-NH2 (analogue of Compound 8)

[1044] Ac-YA(1)IWQDWGEHRhC(1)T-NH2 (analogue of Compound 9)

[1045] Ac-ESSAYA(1)IWQDWGEHRhC(1)T-NH2 (analogue of Compound 10)

[1046] Ac-[Sar]A(1)IWQDWGEHRhC(1)T-NH2 (analogue of Compound 11)

[1047] Ac-IA(1)IWQDWGAHRhC(1)E-NH2 (analogue of Compound 12)

[1048] Ac-IA(1)IWQDWGEHRhC(1)[Sar]-NH2 (analogue of Compound 13)

[1049] Ac-ESSAIA(1)IWQDWGEHRhC(1)TGAES-NH2 (analogue of Compound 14)

[1050] Ac-IA(1)IWQDWGEHRhC(1)TGAES-NH2 (analogue of Compound 15)

[1051] Ac-IA(1)IWQEWGEHRhC(1)T-NH2 (analogue of Compound 16)

[1052] Ac-IA(1)IWQDWGDHRhC(1)T-NH2 (analogue of Compound 17)

[1053] Ac-IA(1)IWQDWGRHRhC(1)T-NH2 (analogue of Compound 18)

[1054] Ac-IA(1)IWQDWGAHShC(1)T-NH2 (analogue of Compound 19)

[1055] Ac-IA(1)IWQDWGEHShC(1)T-NH2 (analogue of Compound 20)

[1056] Ac-IA(1)IWQDWGEHRhC(1)S-NH2 (analogue of Compound 21)

[1057] Ac-IA(1)IWQDWGEHRhC(1)E-NH2 (analogue of Compound 22)

[1058] Ac-FA(1)IWQDWGEHRhC(1)T-NH2 (analogue of Compound 23)

[1059] Ac-IA(1)IWQDWGEHRhC(1)TEGE-NH2 (analogue of Compound 24)

[1060] Ac-IA(1)IWQDWGEHRhC(1)TEA-NH2 (analogue of Compound 25)

[1061] Ac-IA(1)IWQDWGEHRhC(1)TE-NH2 (analogue of Compound 26)

[1062] Ac-IA(1)IWQDWGEHRhC(1)EGE-NH2 (analogue of Compound 27)

[1063] Ac-EGSAIA(1)IWQDWGEHRhC(1)[Sar]E-NH2 (analogue of Compound 28)

[1064] Ac-EGSAIA(1)IWQDWGEHRhC(1)T-NH2 (analogue of Compound 29)

[1065] Ac-EGEIA(1)IWQDWGEHRhC(1)T-NH2 (analogue of Compound 30)

[1066] Ac-ESEIA(1)IWQDWGEHRhC(1)T-NH2 (analogue of Compound 31)

[1067] Ac-SEIA(1)IWQDWGEHRhC(1)TEA-NH2 (analogue of Compound 32)

[1068] Ac-EIA(1)IWQDWGEHRhC(1)TE-NH2 (analogue of Compound 33)

[1069] Ac-EIA(1)IWQDWGEHRhC(1)TEGE-NH2 (analogue of Compound 34)

[1070] Ac-EGEIA(1)IWQDWGEHRhC(1)EGE-NH2 (analogue of Compound 35)

[1071] Ac-ESEIA(1)IWQDWGEHRhC(1)EGE-NH2 (analogue of Compound 36)

[1072] Ac-KEKIA(1)IWQDWGEHRhC(1)TEKE-NH2 (analogue of Compound 37)

[1073] Ac-EKGIA(1)IWQDWGEHRhC(1)TEKP-NH2 (analogue of Compound 38)

[1074] Ac-IA(1)IWQDWGEHRhC(1)TEGK-NH2 (analogue of Compound 39)

[1075] Ac-GSAIA(1)IWQDWGEHRhC(1)[Sar]E-NH2 (analogue of Compound 40)

[1076] Ac-SAIA(1)IWQDWGEHRhC(1)[Sar]E-NH2 (analogue of Compound 41)

[1077] Ac-SAIA(1)IWQDWGEHRhC(1)TEG-NH2 (analogue of Compound 42)

[1078] Ac-FA(1)IWQDWGEHRhC(1)TGAE-NH2 (analogue of Compound 43)

[1079] Ac-EGSAIA(1)IWQDWGEHRhC(1)[Sar]EGE-NH2 (analogue of Compound 44)

[1080] Ac-EGSAFA(1)IWQDWGEHRhC(1)[Sar]E-NH2 (analogue of Compound 45)

[1081] Ac-ESSAIA(1)IWQDWGAHRhC(1)T-NH2 (analogue of Compound 46)

[1082] Ac-IA(1)IWQDWGAHRhC(1)TGAES-NH2 (analogue of Compound 47)

[1083] H-{d}YIA(1)l[1-Me-Trp]QDW[Sar]AHRhC(1)[N-Me-Ile]-NH2 (analogue of Compound 48)

[1084] Ac-EGSAIA(1)I[1-Me-Trp]QDWGEHRhC(1)[Sar]E-NH2 (analogue of Compound 49)

[1085] Ac-EGSAIA(1)1[2-Nal]QDWGEHRhC(1)[Sar]E-NH2 (analogue of Compound 50)

[1086] Ac-IA(1)I[1-Me-Trp]QDWGEHRhC(1)TGAES-NH2 (analogue of Compound 51)

[1087] Ac-IA(1)l[2-Nal]QDWGEHRhC(1)TGAES-NH2 (analogue of Compound 52)

[1088] Ac-EGSAFA(1)1[1-Me-Trp]QDWGEHRhC(1)[Sar]E-NH2 (analogue of Compound 53)

[1089] Ac-EGSAYA(1)1[1-Me-Trp]QDWGEHRhC(1)[Sar]E-NH2 (analogue of Compound 54)

[1090] Ac-EGSAIA(1)IWQDWGEHRhC(1)TE-NH2 (analogue of Compound 55)

[1091] Ac-EGSAFA(1)1[1-Nal]QDWGEHRhC(1)TE-NH2 (analogue of Compound 56)

[1092] Ac-EGSAFA(1)I[1-Me-Trp]QDWGEHRhC(1)TE-NH2 (analogue of Compound 57)

[1093] Ac-EGSAFA(1)I[1-Me-Trp]QDWGEHRhC(1)EGE-NH2 (analogue of Compound 58)

[1094] Ac-EGSAYA(1)1[1-Me-Trp]QDWGEHRhC(1)TE-NH2 (analogue of Compound 59)

[1095] Ac-EGSAFA(1)I[2-Nal]QDWGEHRhC(1)TE-NH2 (analogue of Compound 60)

[1096] Ac-FA(1)1[1-Me-Trp]QDWGEHRhC(1)TGAES-NH2 (analogue of Compound 61)

[1097] Ac-YA(1)1[1-Me-Trp]QDWGEHRhC(1)TGAES-NH2 (analogue of Compound 62)

[1098] Ac-FA(1)I[1-Nal]QDWGEHRhC(1)TGAES-NH2 (analogue of Compound 63)

[1099] Ac-FA(1)1[2-Nal]QDWGEHRhC(1)TGAES-NH2 (analogue of Compound 64)

[1100] Ac-YA(1)l[2-Nal]QDWGEHRhC(1)TGAES-NH2 (analogue of Compound 65)

[1101] Ac-YA(1)IWQDWGEHRhC(1)TGAES-NH2 (analogue of Compound 66)

[1102] Ac-SEFA(1)l[1-Me-Trp]QDWGEHRhC(1)TGAES-NH2 (Compound 151; analogue of Compound 67)

[1103] Ac-YA(1)1[1-Me-Trp]QDWGEHRhC(1)TEAGS-NH2 (analogue of Compound 68)

[1104] Ac-YA(1)1[1-Me-Trp]QDWGEHRhC(1)TESGA-NH2 (analogue of Compound 69)

[1105] Ac-EGSAYA(1)1[1-Me-Trp]QEWGEHRhC(1)[Sar]E-NH2 (analogue of Compound 70)

[1106] Ac-SEYA(1)l[1-Me-Trp]QDWGEHRhC(1)[Sar]EA-NH2 (analogue of Compound 71)

[1107] Ac-FA(1)I[1-Me-Trp]QDW[Sar]EHRhC(1)TGAES-NH2 (analogue of Compound 72)

[1108] H-{d}YFA(1)1[1-Me-Trp]QDW[Sar]EHRhC(1)TGAES-NH2 (analogue of Compound 73)

[1109] Ac-SEFA(1)l[1-Me-Trp]QDWGEHRhC(1)[Sar]GAES-NH2 (analogue of Compound 74)

[1110] Ac-SEFA(1)l[1-Me-Trp]QDWGEHRhC(1)[Sar]EA-NH2 (analogue of Compound 75)

[1111] Ac-SEFA(1)1[1-Me-Trp]QDW[Sar]EHRhC(1)[Sar]EA-NH2 (analogue of Compound 76)

[1112] Ac-SEFA(1)1[1-Me-Trp]QDW[Sar]EHRhC(1)TEA-NH2 (analogue of Compound 77)

[1113] Ac-SEFA(1)l[1-Me-Trp]QDWGEHRhC(1)[Sar]E-NH2 (analogue of Compound 78)

[1114] Ac-SEFA(1)l[1-Me-Trp]QDW[Sar]EHRhC(1)[Sar]E-NH2 (analogue of Compound 79)

[1115] Ac-EFA(1)l[1-Me-Trp]QDWGEHRhC(1)[Sar]EA-NH2 (analogue of Compound 80)

[1116] Ac-SE[Sar]A(1)1[1-Me-Trp]QDWGEHRhC(1)[Sar]EA-NH2 (analogue of Compound 81)

[1117] Ac-SE[Sar]A(1)1[1-Me-Trp]QDWGEHRhC(1)TEA-NH2 (analogue of Compound 82)

[1118] Ac-SEFA(1)l[1-Me-Trp]QEWGEHRhC(1)[Sar]EA-NH2 (analogue of Compound 83)

[1119] Ac-SEFA(1)1[1-Me-Trp]QDWGEHRhC(1)SEA-NH2 (analogue of Compound 84)

[1120] Ac-EFA(1)l[1-Me-Trp]QDWGEHRhC(1)ES-NH2 (analogue of Compound 85)

[1121] Ac-SEFA(1)l[1-Me-Trp]QDWGEHKhC(1)[Sar]EA-NH2 (analogue of Compound 86)

[1122] Ac-GEFA(1)1[1-Me-Trp]QDWGEHRhC(1)[Sar]EA-NH2 (analogue of Compound 87)

[1123] Ac-GE[Sar]A(1)1[1-Me-Trp]QDWGEHRhC(1)TEA-NH2 (analogue of Compound 88)

[1124] Ac-SE[Sar]A(1)1[1-Me-Trp]QEW[Sar]EHRhC(1)TEA-NH2 (analogue of Compound 89)

[1125] Ac-SE[Sar]A(1)l[1-Me-Trp]QEWGEHRhC(1)[Sar]EA-NH2 (analogue of Compound 90)

[1126] H-{d}Y[Sar]A(1)1[1-Me-Trp]QDWGEHRhC(1)TEA-NH2 (analogue of Compound 91)

[1127] wherein the side chains of residues designated A(1) and hC(1) form a cystathionine bridge.

[1128] For example, the compstatin analogue may be:

[1129] Ac-IC(1)IWQDWGAHRA(1)T-NH2 (analogue of Compound 1)

[1130] Ac-IC(1)IWQDWGEHRA(1)T-NH2 (analogue of Compound 2)

[1131] Ac-ESSAIC(1)IWQDWGEHRA(1)T-NH2 (analogue of Compound 3)

[1132] Ac-IC(1)1[1-Me-Trp]QDWGEHRA(1)T-NH2 (analogue of Compound 4)

[1133] Ac-IC(1)IWQDWGKHRA(1)T-NH2 (analogue of Compound 5)

[1134] Ac-IC(1)IWQDWGSHRA(1)T-NH2 (analogue of Compound 6)

[1135] Ac-IC(1)IWQKWGEHRA(1)T-NH2 (analogue of Compound 7)

[1136] Ac-IC(1)IWQKWGAHRA(1)TGAES-NH2 (analogue of Compound 8)

[1137] Ac-YC(1)IWQDWGEHRA(1)T-NH2 (analogue of Compound 9)

[1138] Ac-ESSAYC(1)IWQDWGEHRA(1)T-NH2 (analogue of Compound 10)

[1139] Ac-[Sar]C(1)IWQDWGEHRA(1)T-NH2 (analogue of Compound 11)

[1140] Ac-IC(1)IWQDWGAHRA(1)E-NH2 (analogue of Compound 12)

[1141] Ac-IC(1)IWQDWGEHRA(1)[Sar]-NH2 (analogue of Compound 13)

[1142] Ac-ESSAIC(1)IWQDWGEHRA(1)TGAES-NH2 (analogue of Compound 14)

[1143] Ac-IC(1)IWQDWGEHRA(1)TGAES-NH2 (analogue of Compound 15)

[1144] Ac-IC(1)IWQEWGEHRA(1)T-NH2 (analogue of Compound 16)

[1145] Ac-IC(1)IWQDWGDHRA(1)T-NH2 (analogue of Compound 17)

[1146] Ac-IC(1)IWQDWGRHRA(1)T-NH2 (analogue of Compound 18)

[1147] Ac-IC(1)IWQDWGAHSA(1)T-NH2 (analogue of Compound 19)

[1148] Ac-IC(1)IWQDWGEHSA(1)T-NH2 (analogue of Compound 20)

[1149] Ac-IC(1)IWQDWGEHRA(1)S-NH2 (analogue of Compound 21)

[1150] Ac-IC(1)IWQDWGEHRA(1)E-NH2 (analogue of Compound 22)

[1151] Ac-FC(1)IWQDWGEHRA(1)T-NH2 (analogue of Compound 23)

[1152] Ac-IC(1)IWQDWGEHRA(1)TEGE-NH2 (analogue of Compound 24)

[1153] Ac-IC(1)IWQDWGEHRA(1)TEA-NH2 (analogue of Compound 25)

[1154] Ac-IC(1)IWQDWGEHRA(1)TE-NH2 (analogue of Compound 26)

[1155] Ac-IC(1)IWQDWGEHRA(1)EGE-NH2 (analogue of Compound 27)

[1156] Ac-EGSAIC(1)IWQDWGEHRA(1)[Sar]E-NH2 (analogue of Compound 28)

[1157] Ac-EGSAIC(1)IWQDWGEHRA(1)T-NH2 (analogue of Compound 29)

[1158] Ac-EGEIC(1)IWQDWGEHRA(1)T-NH2 (analogue of Compound 30)

[1159] Ac-ESEIC(1)IWQDWGEHRA(1)T-NH2 (analogue of Compound 31)

[1160] Ac-SEIC(1)IWQDWGEHRA(1)TEA-NH2 (analogue of Compound 32)

[1161] Ac-EIC(1)IWQDWGEHRA(1)TE-NH2 (analogue of Compound 33)

[1162] Ac-EIC(1)IWQDWGEHRA(1)TEGE-NH2 (analogue of Compound 34)

[1163] Ac-EGEIC(1)IWQDWGEHRA(1)EGE-NH2 (analogue of Compound 35)

[1164] Ac-ESEIC(1)IWQDWGEHRA(1)EGE-NH2 (analogue of Compound 36)

[1165] Ac-KEKIC(1)IWQDWGEHRA(1)TEKE-NH2 (analogue of Compound 37)

[1166] Ac-EKGIC(1)IWQDWGEHRA(1)TEKP-NH2 (analogue of Compound 38)

[1167] Ac-IC(1)IWQDWGEHRA(1)TEGK-NH2 (analogue of Compound 39)

[1168] Ac-GSAIC(1)IWQDWGEHRA(1)[Sar]E-NH2 (analogue of Compound 40)

[1169] Ac-SAIC(1)IWQDWGEHRA(1)[Sar]E-NH2 (analogue of Compound 41)

[1170] Ac-SAIC(1)IWQDWGEHRA(1)TEG-NH2 (analogue of Compound 42)

[1171] Ac-FC(1)IWQDWGEHRA(1)TGAE-NH2 (analogue of Compound 43)

[1172] Ac-EGSAIC(1)IWQDWGEHRA(1)[Sar]EGE-NH2 (analogue of Compound 44)

[1173] Ac-EGSAFC(1)IWQDWGEHRA(1)[Sar]E-NH2 (analogue of Compound 45)

[1174] Ac-ESSAIC(1)IWQDWGAHRA(1)T-NH2 (analogue of Compound 46)

[1175] Ac-IC(1)IWQDWGAHRA(1)TGAES-NH2 (analogue of Compound 47)

[1176] H-{d}YIC(1)l[1-Me-Trp]QDW[Sar]AHRA(1)[N-Me-Ile]-NH2 (analogue of Compound 48)

[1177] Ac-EGSAIC(1)1[1-Me-Trp]QDWGEHRA(1)[Sar]E-NH2 (analogue of Compound 49)

[1178] Ac-EGSAIC(1)l[2-Nal]QDWGEHRA(1)[Sar]E-NH2 (analogue of Compound 50)

[1179] Ac-IC(1)l[1-Me-Trp]QDWGEHRA(1)TGAES-NH2 (analogue of Compound 51)

[1180] Ac-IC(1)l[2-Nal]QDWGEHRA(1)TGAES-NH2 (analogue of Compound 52)

[1181] Ac-EGSAFC(1)1[1-Me-Trp]QDWGEHRA(1)[Sar]E-NH2 (analogue of Compound 53)

[1182] Ac-EGSAYC(1)I[1-Me-Trp]QDWGEHRA(1)[Sar]E-NH2 (analogue of Compound 54)

[1183] Ac-EGSAIC(1)IWQDWGEHRA(1)TE-NH2 (analogue of Compound 55)

[1184] Ac-EGSAFC(1)1[1-Nal]QDWGEHRA(1)TE-NH2 (analogue of Compound 56)

[1185] Ac-EGSAFC(1)l[1-Me-Trp]QDWGEHRA(1)TE-NH2 (analogue of Compound 57)

[1186] Ac-EGSAFC(1)1[1-Me-Trp]QDWGEHRA(1)EGE-NH2 (analogue of Compound 58)

[1187] Ac-EGSAYC(1)l[1-Me-Trp]QDWGEHRA(1)TE-NH2 (analogue of Compound 59)

[1188] Ac-EGSAFC(1)1[2-Nal]QDWGEHRA(1)TE-NH2 (analogue of Compound 60)

[1189] Ac-FC(1)l[1-Me-Trp]QDWGEHRA(1)TGAES-NH2 (analogue of Compound 61)

[1190] Ac-YC(1)l[1-Me-Trp]QDWGEHRA(1)TGAES-NH2 (analogue of Compound 62)

[1191] Ac-FC(1)1[1-Nal]QDWGEHRA(1)TGAES-NH2 (analogue of Compound 63)

[1192] Ac-FC(1)1[2-Nal]QDWGEHRA(1)TGAES-NH2 (analogue of Compound 64)

[1193] Ac-YC(1)1[2-Nal]QDWGEHRA(1)TGAES-NH2 (analogue of Compound 65)

[1194] Ac-YC(1)IWQDWGEHRA(1)TGAES-NH2 (analogue of Compound 66)

[1195] Ac-SEFC(1)l[1-Me-Trp]QDWGEHRA(1)TGAES-NH2 (analogue of Compound 67 and 151)

[1196] Ac-YC(1)l[1-Me-Trp]QDWGEHRA(1)TEAGS-NH2 (analogue of Compound 68)

[1197] Ac-YC(1)1[1-Me-Trp]QDWGEHRA(1)TESGA-NH2 (analogue of Compound 69)

[1198] Ac-EGSAYC(1)1[1-Me-Trp]QEWGEHRA(1)[Sar]E-NH2 (analogue of Compound 70)

[1199] Ac-SEYC(1)1[1-Me-Trp]QDWGEHRA(1)[Sar]EA-NH2 (analogue of Compound 71)

[1200] Ac-FC(1)l[1-Me-Trp]QDW[Sar]EHRA(1)TGAES-NH2 (analogue of Compound 72)

[1201] H-{d}YFC(1)l[1-Me-Trp]QDW[Sar]EHRA(1)TGAES-NH2 (analogue of Compound 73)

[1202] Ac-SEFC(1)1[1-Me-Trp]QDWGEHRA(1)[Sar]GAES-NH2 (analogue of Compound 74)

[1203] Ac-SEFC(1)1[1-Me-Trp]QDWGEHRA(1)[Sar]EA-NH2 (analogue of Compound 75)

[1204] Ac-SEFC(1)1[1-Me-Trp]QDW[Sar]EHRA(1)[Sar]EA-NH2 (analogue of Compound 76)

[1205] Ac-SEFC(1)l[1-Me-Trp]QDW[Sar]EHRA(1)TEA-NH2 (analogue of Compound 77)

[1206] Ac-SEFC(1)1[1-Me-Trp]QDWGEHRA(1)[Sar]E-NH2 (analogue of Compound 78)

[1207] Ac-SEFC(1)l[1-Me-Trp]QDW[Sar]EHRA(1)[Sar]E-NH2 (analogue of Compound 79)

[1208] Ac-EFC(1)l[1-Me-Trp]QDWGEHRA(1)[Sar]EA-NH2 (analogue of Compound 80)

[1209] Ac-SE[Sar]C(1)l[1-Me-Trp]QDWGEHRA(1)[Sar]EA-NH2 (analogue of Compound 81)

[1210] Ac-SE[Sar]C(1)I[1-Me-Trp]QDWGEHRA(1)TEA-NH2 (analogue of Compound 82)

[1211] Ac-SEFC(1)I[1-Me-Trp]QEWGEHRA(1)[Sar]EA-NH2 (analogue of Compound 83)

[1212] Ac-SEFC(1)I[1-Me-Trp]QDWGEHRA(1)SEA-NH2 (analogue of Compound 84)

[1213] Ac-EFC(1)1[1-Me-Trp]QDWGEHRA(1)ES-NH2 (analogue of Compound 85)

[1214] Ac-SEFC(1)l[1-Me-Trp]QDWGEHKA(1)[Sar]EA-NH2 (analogue of Compound 86)

[1215] Ac-GEFC(1)l[1-Me-Trp]QDWGEHRA(1)[Sar]EA-NH2 (analogue of Compound 87)

[1216] Ac-GE[Sar]C(1)l[1-Me-Trp]QDWGEHRA(1)TEA-NH2 (analogue of Compound 88)

[1217] Ac-SE[Sar]C(1)1[1-Me-Trp]QEW[Sar]EHRA(1)TEA-NH2 (analogue of Compound 89)

[1218] Ac-SE[Sar]C(1)I[1-Me-Trp]QEWGEHRA(1)[Sar]EA-NH2 (analogue of Compound 90)

[1219] H-{d}Y[Sar]C(1)1[1-Me-Trp]QDWGEHRA(1)TEA-NH2 (analogue of Compound 91)

[1220] wherein the side chains of residues designated C(1) and A(1) form a lanthionine bridge.

[1221] Alternatively, the compstatin analogue may comprise one of the following sequences:

[1222] [K*]GSAI-X2-IWQDWGEHR-X12-TEGE (analogue of Compound 100)

[1223] ASGEY-X2-1[1-Me-Trp]QDWGEHR-X12-[Sar]EGE-[K*] (analogue of Compound 113)

[1224] EF-X2-l[1-Me-Trp]QDWGEHR-X12-EGE-[K*] (analogue of Compound 134 and 161)

[1225] EGSAI-X2-IWQDWGEHR-X12-TEG[K*] (analogue of Compound 101)

[1226] EGSAY-X2-1[1-Me-Trp]QDWGEH[K*]-X12-[Sar]E (analogue of Compound 103)

[1227] EGSAY-X2-1[1-Me-Trp]QDWGEHR-X12-[Sar]EG-[K*] (analogue of Compound 104)

[1228] EGSAY-X2-l[1-Me-Trp]QDWGEHR-X12-[Sar]EGE-[K*] (analogue of Compound 109)

[1229] EGSAY-X2-1[1-Me-Trp]QDWGEHR-X12-[Sar]EGK-[K*] (analogue of Compound 110)

[1230] EGSAY-X2-1[1-Me-Trp]QDWGEHR-X12-[Sar]EK[γGlu]-[K*] (analogue of Compound 111 and 159)

[1231] F-X2-l[1-Me-Trp]QDWGEHR-X12-TGAES-[K*] (analogue of Compound 102)

[1232] I-X2-IWQDWGEHR-X12-TEG-[K*] (analogue of Compound 92)

[1233] I-X2-IWQDWGEHR-X12-TEGE-[K*] (analogue of Compound 94)

[1234] SAY-X2-l[1-Me-Trp]QDWGEHR-X12-[Sar]E-[K*] (analogue of Compound 105)

[1235] SEF-X2-1[1-Me-Trp]QDWGEHR-X12-[Sar]EGA-[K*] (analogue of Compound 119 and 154)

[1236] SEF-X2-l[1-Me-Trp]QDWGEHR-X12-[Sar]EGE[Peg3][Peg3]-[K*] (analogue of Compound 123, 146 and 152)

[1237] SEF-X2-1[1-Me-Trp]QDWGEHR-X12-[Sar]EGEGGG-[K*] (analogue of Compound 129)

[1238] SEF-X2-1[1-Me-Trp]QDWGEHR-X12-[Sar]EGE[Peg3]-[K*] (analogue of Compound 138)

[1239] SEF-X2-l[1-Me-Trp]QDWGEHR-X12-[Sar]EGE[Peg3]ES-[K*] (analogue of Compound 140)

[1240] SEF-X2-l[1-Me-Trp]QDWGEHR-X12-[Sar]EGE[Peg3][Peg3]-[K*] (analogue of Compound 127 and 160)

[1241] SEF-X2-l[1-Me-Trp]QDWGEHR-X12-[Sar]EGESES-[K*] (analogue of Compound 139)

[1242] SEF-X2-l[1-Me-Trp]QDWGEHR-X12-[Sar]EK[γGlu]GGG-[K*] (analogue of Compound 132)

[1243] SEF-X2-l[1-Me-Trp]QDWGEHR-X12-TEGE[8-aminooctanoyl]-[K*] (analogue of Compound 136)

[1244] SEF-X2-1[1-Me-Trp]QDWGEHR-X12-TEGE[8-aminooctanoyl]E-[K*] (analogue of Compound 137)

[1245] SEF-X2-1[1-Me-Trp]QDWGEHR-X12-TEGEGGG-[K*] (analogue of Compound 130 and 157)

[1246] SEF-X2-1[1-Me-Trp]QDWGEHR-X12-TEGE[Peg3]ES-[K*] (analogue of Compound 142, 148, 163 and 165)

[1247] SEF-X2-l[1-Me-Trp]QDWGEHR-X12-TEGE[Peg3][Peg3]-[K*] (analogue of Compound 126 and 156)

[1248] SEF-X2-l[1-Me-Trp]QDWGEHR-X12-TEK[γGlu]GGG-[K*] (analogue of Compound 133)

[1249] SEF-X2-l[1-Me-Trp]QDWGEHR-X12-TGAES-[K*] (analogue of Compound 135)

[1250] SEF-X2-1[1-Me-Trp]QEWGEHR-X12-[Sar]EGA-[K*] (analogue of Compound 120)

[1251] SEF-X2-l[1-Me-Trp]QEWGEHR-X12-[Sar]EGE[Peg3][Peg3]-[K*] (analogue of Compound 124, 153 and 167)

[1252] SEY-X2-l[1-Me-Trp]QDWGEHR-X12-[Sar]EGA-[K*] (analogue of Compound 112)

[1253] SEY-X2-l[1-Me-Trp]QDWGEHR-X12-[Sar]EGE[Peg3][Peg3]-[K*] (analogue of Compound 117)

[1254] SEY-X2-l[1-Me-Trp]QDWGEHR-X12-[Sar]EGE-[K*] (analogue of Compound 114)

[1255] SEY-X2-l[1-Me-Trp]QEW[Sar]EHR-X12-[Sar]EK[γGlu]A-[K*] (analogue of Compound 121)

[1256] SEY-X2-l[1-Me-Trp]QEWGEHR-X12-[Sar]EGA-[K*] (analogue of Compound 122)

[1257] SEY-X2-1[1-Me-Trp]QEWGEHR-X12-[Sar]EGE[Peg3][Peg3]-[K*] (analogue of Compound 125)

[1258] EGSEY-X2-l[1-Me-Trp]QDWGEHR-X12-[Sar]E (analogue of Compound 107)

[1259] ESSAI-X2-IWQDWGEHR-X12-TEGE (analogue of Compound 99)

[1260] SEF-X2-l[1-Me-Trp]QDWGEHR-X12-[Sar]EGE[Peg3][Peg3][Peg3]-[K*] (analogue of Compound 143)

[1261] SEF-X2-l[1-Me-Trp]QDW[Sar]EHR-X12-[Sar]E[Peg3][Peg3]-[K*] (analogue of Compound 144, 147, 162 and 164)

[1262] EF-X2-1[1-Me-Trp]QDWGEHR-X12-[Sar]EA[Peg3][Peg3]-[K*] (analogue of Compound 145)

[1263] GEF-X2-l[1-Me-Trp]QDW[Sar]EHR-X12-[Sar]EAE[Peg3][Peg3]-[K*] (analogue of Compound 149)

[1264] SEF-X2-l[1-Me-Trp]QDW[Sar]EHR-X12-[Sar]EGE[Peg3]ES-[K*] (analogue of Compound 150 and 166)

[1265] GEF-X2-l[1-Me-Trp]QEWGEHR-X12-[Sar]EGE[Peg3]ES-[K*] (analogue of Compound 155)

[1266] EF-X2-1[1-Me-Trp]QEWGEHR-X12-[Sar]EA[Peg3][Peg3]-[K*] (analogue of Compound 158)

[1267] wherein X2 and X12 are residues whose side chains are linked by a thioether bond; and

[1268] wherein * indicates that the amino acid residue bears a lipophilic group Φ covalently attached to its side chain.

[1269] Alternatively, the compstatin analogue may comprise one of the following sequences:

[1270] [K*]GSAIhC(1)IWQDWGEHRA(1)TEGE (analogue of Compound 100)

[1271] ASGEYhC(1)1[1-Me-Trp]QDWGEHRA(1)[Sar]EGE-[K*] (analogue of Compound 113)

[1272] EFhC(1)l[1-Me-Trp]QDWGEHRA(1)EGE-[K*] (analogue of Compound 134 and 161)

[1273] EGSAIhC(1)IWQDWGEHRA(1)TEG[K*] (analogue of Compound 101)

[1274] EGSAYhC(1)1[1-Me-Trp]QDWGEH[K*]A(1)[Sar]E (analogue of Compound 103)

[1275] EGSAYhC(1)l[1-Me-Trp]QDWGEHRA(1)[Sar]EG-[K*] (analogue of Compound 104)

[1276] EGSAYhC(1)1[1-Me-Trp]QDWGEHRA(1)[Sar]EGE-[K*] (analogue of Compound 109)

[1277] EGSAYhC(1)l[1-Me-Trp]QDWGEHRA(1)[Sar]EGK-[K*] (analogue of Compound 110)

[1278] EGSAYhC(1)1[1-Me-Trp]QDWGEHRA(1)[Sar]EK[γGlu]-[K*] (analogue of Compound 111 and 159)

[1279] FhC(1)1[1-Me-Trp]QDWGEHRA(1)TGAES-[K*] (analogue of Compound 102)

[1280] IhC(1)IWQDWGEHRA(1)TEG-[K*] (analogue of Compound 92)

[1281] IhC(1)IWQDWGEHRA(1)TEGE-[K*] (analogue of Compound 94)

[1282] SAYhC(1)l[1-Me-Trp]QDWGEHRA(1)[Sar]E-[K*] (analogue of Compound 105)

[1283] SEFhC(1)1[1-Me-Trp]QDWGEHRA(1)[Sar]EGA-[K*] (analogue of Compound 119 and 154)

[1284] SEFhC(1)1[1-Me-Trp]QDWGEHRA(1)[Sar]EGE[Peg3][Peg3]-[K*] (Compound 152; analogue of Compound 123 and 146)

[1285] SEFhC(1)1[1-Me-Trp]QDWGEHRA(1)[Sar]EGEGGG-[K*] (analogue of Compound 129)

[1286] SEFhC(1)1[1-Me-Trp]QDWGEHRA(1)[Sar]EGE[Peg3]-[K*] (analogue of Compound 138)

[1287] SEFhC(1)1[1-Me-Trp]QDWGEHRA(1)[Sar]EGE[Peg3]ES-[K*] (analogue of Compound 140)

[1288] SEFhC(1)l[1-Me-Trp]QDWGEHRA(1)[Sar]EGE[Peg3][Peg3]-[K*] (analogue of Compound 127 and 160)

[1289] SEFhC(1)l[1-Me-Trp]QDWGEHRA(1)[Sar]EGESES-[K*] (analogue of Compound 139)

[1290] SEFhC(1)1[1-Me-Trp]QDWGEHRA(1)[Sar]EK[γGlu]GGG-[K*] (analogue of Compound 132)

[1291] SEFhC(1)1[1-Me-Trp]QDWGEHRA(1)TEGE[8-aminooctanoyl]-[K*] (analogue of Compound 136)

[1292] SEFhC(1)1[1-Me-Trp]QDWGEHRA(1)TEGE[8-aminooctanoyl]E-[K*] (analogue of Compound 137)

[1293] SEFhC(1)1[1-Me-Trp]QDWGEHRA(1)TEGEGGG-[K*] (analogue of Compound 130 and 157)

[1294] SEFhC(1)1[1-Me-Trp]QDWGEHRA(1)TEGE[Peg3]ES-[K*] (Compound 165; analogue of Compound 142, 148 and 163)

[1295] SEFhC(1)1[1-Me-Trp]QDWGEHRA(1)TEGE[Peg3][Peg3]-[K*] (analogue of Compound 126 and 156)

[1296] SEFhC(1)i[1-Me-Trp]QDWGEHRA(1)TEK[γGlu]GGG-[K*] (analogue of Compound 133)

[1297] SEFhC(1)1[1-Me-Trp]QDWGEHRA(1)TGAES-[K*] (analogue of Compound 135)

[1298] SEFhC(1)l[1-Me-Trp]QEWGEHRA(1)[Sar]EGA-[K*] (analogue of Compound 120)

[1299] SEFhC(1)l[1-Me-Trp]QEWGEHRA(1)[Sar]EGE[Peg3][Peg3]-[K*] (Compound 167; analogue of Compound 124 and 153)

[1300] SEYhC(1)1[1-Me-Trp]QDWGEHRA(1)[Sar]EGA-[K*] (analogue of Compound 112)

[1301] SEYhC(1)1[1-Me-Trp]QDWGEHRA(1)[Sar]EGE[Peg3][Peg3]-[K*] (analogue of Compound 117)

[1302] SEYhC(1)l[1-Me-Trp]QDWGEHRA(1)[Sar]EGE-[K*] (analogue of Compound 114)

[1303] SEYhC(1)l[1-Me-Trp]QEW[Sar]EHRA(1)[Sar]EK[γGlu]A-[K*] (analogue of Compound 121)

[1304] SEYhC(1)l[1-Me-Trp]QEWGEHRA(1)[Sar]EGA-[K*] (analogue of Compound 122)

[1305] SEYhC(1)1[1-Me-Trp]QEWGEHRA(1)[Sar]EGE[Peg3][Peg3]-[K*] (analogue of Compound 125)

[1306] (1)1[1-Me-Trp]QDWGEHRA(1)[Sar]E (analogue of Compound 107)

[1307] ESSAIhC(1)IWQDWGEHRA(1)TEGE (analogue of Compound 99)

[1308] SEFhC(1)1[1-Me-Trp]QDWGEHRA(1)[Sar]EGE[Peg3][Peg3][Peg3]-[K*] (analogue of Compound 143)

[1309] SEFhC(1)l[1-Me-Trp]QDW[Sar]EHRA(1)[Sar]E[Peg3][Peg3]-[K*] (Compound 164; analogue of Compound 144, 147 and 162)

[1310] EFhC(1)l[1-Me-Trp]QDWGEHRA(1)[Sar]EA[Peg3][Peg3]-[K*] (analogue of Compound 145)

[1311] GEFhC(1)1[1-Me-Trp]QDW[Sar]EHRA(1)[Sar]EAE[Peg3][Peg3]-[K*] (analogue of Compound 149)

[1312] SEFhC(1)l[1-Me-Trp]QDW[Sar]EHRA(1)[Sar]EGE[Peg3]ES-[K*] (Compound 166; analogue of Compound 150)

[1313] GEFhC(1)1[1-Me-Trp]QEWGEHRA(1)[Sar]EGE[Peg3]ES-[K*] (analogue of Compound 155)

[1314] EFhC(1)l[1-Me-Trp]QEWGEHRA(1)[Sar]EA[Peg3][Peg3]-[K*] (analogue of Compound 158)

[1315] wherein the side chains of residues designated hC(1) and A(1) form a cystathionine bridge.

[1316] Alternatively, the compstatin analogue may comprise one of the following sequences:

[1317] [K*]GSAIA(1)IWQDWGEHRhC(1)TEGE (analogue of Compound 100)

[1318] ASGEYA(1)l[1-Me-Trp]QDWGEHRhC(1)[Sar]EGE-[K*] (analogue of Compound 113)

[1319] EFA(1)1[1-Me-Trp]QDWGEHRhC(1)EGE-[K*] (Compound 161; analogue of Compound 134)

[1320] EGSAIA(1)IWQDWGEHRhC(1)TEG[K*] (analogue of Compound 101)

[1321] EGSAYA(1)l[1-Me-Trp]QDWGEH[K*]hC(1)[Sar]E (analogue of Compound 103)

[1322] EGSAYA(1)l[1-Me-Trp]QDWGEHRhC(1)[Sar]EG-[K*] (analogue of Compound 104)

[1323] EGSAYA(1)l[1-Me-Trp]QDWGEHRhC(1)[Sar]EGE-[K*] (analogue of Compound 109)

[1324] EGSAYA(1)l[1-Me-Trp]QDWGEHRhC(1)[Sar]EGK-[K*] (analogue of Compound 110)

[1325] EGSAYA(1)l[1-Me-Trp]QDWGEHRhC(1)[Sar]EK[γGlu]-[K*] (Compound 159; analogue of Compound 111)

[1326] FA(1)l[1-Me-Trp]QDWGEHRhC(1)TGAES-[K*] (analogue of Compound 102)

[1327] IA(1)IWQDWGEHRhC(1)TEG-[K*] (analogue of Compound 92)

[1328] IA(1)IWQDWGEHRhC(1)TEGE-[K*] (analogue of Compound 94)

[1329] SAYA(1)l[1-Me-Trp]QDWGEHRhC(1)[Sar]E-[K*] (analogue of Compound 105)

[1330] SEFA(1)l[1-Me-Trp]QDWGEHRhC(1)[Sar]EGA-[K*] (Compound 154; analogue of Compound 119)

[1331] SEFA(1)1[1-Me-Trp]QDWGEHRhC(1)[Sar]EGE[Peg3][Peg3]-[K*] (Compound 146; analogue of Compound 123, 152)

[1332] SEFA(1)I[1-Me-Trp]QDWGEHRhC(1)[Sar]EGEGGG-[K*] (analogue of Compound 129)

[1333] SEFA(1)1[1-Me-Trp]QDWGEHRhC(1)[Sar]EGE[Peg3]-[K*] (analogue of Compound 138)

[1334] SEFA(1)1[1-Me-Trp]QDWGEHRhC(1)[Sar]EGE[Peg3]ES-[K*] (analogue of Compound 140)

[1335] SEFA(1)1[1-Me-Trp]QDWGEHRhC(1)[Sar]EGE[Peg3][Peg3]-[K*] (Compound 160; analogue of Compound 127)

[1336] SEFA(1)1[1-Me-Trp]QDWGEHRhC(1)[Sar]EGESES-[K*] (analogue of Compound 139)

[1337] SEFA(1)1[1-Me-Trp]QDWGEHRhC(1)[Sar]EK[γGlu]GGG-[K*] (analogue of Compound 132)

[1338] SEFA(1)1[1-Me-Trp]QDWGEHRhC(1)TEGE[8-aminooctanoyl]-[K*] (analogue of Compound 136)

[1339] SEFA(1)l[1-Me-Trp]QDWGEHRhC(1)TEGE[8-aminooctanoyl]E-[K*] (analogue of Compound 137)

[1340] SEFA(1)l[1-Me-Trp]QDWGEHRhC(1)TEGEGGG-[K*] (Compound 157; analogue of Compound 130)

[1341] SEFA(1)1[1-Me-Trp]QDWGEHRhC(1)TEGE[Peg3]ES-[K*] (Compound 148 and 163; analogue of Compound 142 and 165)

[1342] SEFA(1)l[1-Me-Trp]QDWGEHRhC(1)TEGE[Peg3][Peg3]-[K*] (Compound 156; analogue of Compound 126)

[1343] SEFA(1)l[1-Me-Trp]QDWGEHRhC(1)TEK[γGlu]GGG-[K*] (analogue of Compound 133)

[1344] SEFA(1)l[1-Me-Trp]QDWGEHRhC(1)TGAES-[K*] (analogue of Compound 135)

[1345] SEFA(1)l[1-Me-Trp]QEWGEHRhC(1)[Sar]EGA-[K*] (analogue of Compound 120)

[1346] SEFA(1)l[1-Me-Trp]QEWGEHRhC(1)[Sar]EGE[Peg3][Peg3]-[K*] (Compound 153; analogue of Compound 124 and 167)

[1347] SEYA(1)1[1-Me-Trp]QDWGEHRhC(1)[Sar]EGA-[K*] (analogue of Compound 112)

[1348] SEYA(1)1[1-Me-Trp]QDWGEHRhC(1)[Sar]EGE[Peg3][Peg3]-[K*] (analogue of Compound 117)

[1349] SEYA(1)1[1-Me-Trp]QDWGEHRhC(1)[Sar]EGE-[K*] (analogue of Compound 114)

[1350] SEYA(1)1[1-Me-Trp]QEW[Sar]EHRhC(1)[Sar]EK[γGlu]A-[K*] (analogue of Compound 121)

[1351] SEYA(1)l[1-Me-Trp]QEWGEHRhC(1)[Sar]EGA-[K*] (analogue of Compound 122)

[1352] SEYA(1)1[1-Me-Trp]QEWGEHRhC(1)[Sar]EGE[Peg3][Peg3]-[K*] (analogue of Compound 125)

[1353] EGSEYA(1)l[1-Me-Trp]QDWGEHRhC(1)[Sar]E (analogue of Compound 107)

[1354] ESSAIA(1)IWQDWGEHRhC(1)TEGE (analogue of Compound 99)

[1355] SEFA(1)1[1-Me-Trp]QDWGEHRhC(1)[Sar]EGE[Peg3][Peg3][Peg3]-[K*] (analogue of Compound 143)

[1356] SEFA(1)1[1-Me-Trp]QDW[Sar]EHRhC(1)[Sar]E[Peg3][Peg3]-[K*] (Compound 147 and 162; analogue of Compound 144 and 164)

[1357] EFA(1)1[1-Me-Trp]QDWGEHRhC(1)[Sar]EA[Peg3][Peg3]-[K*] (analogue of Compound 145)

[1358] GEFA(1)I[1-Me-Trp]QDW[Sar]EHRhC(1)[Sar]EAE[Peg3][Peg3]-[K*] (Compound 149)

[1359] SEFA(1)1[1-Me-Trp]QDW[Sar]EHRhC(1)[Sar]EGE[Peg3]ES-[K*] (Compound 150; analogue of compound 166)

[1360] GEFA(1)I[1-Me-Trp]QEWGEHRhC(1)[Sar]EGE[Peg3]ES-[K*] (Compound 155)

[1361] EFA(1)l[1-Me-Trp]QEWGEHRhC(1)[Sar]EA[Peg3][Peg3]-[K*] (Compound 158)

[1362] wherein the side chains of residues designated A(1) and hC(1) form a cystathionine bridge.

[1363] Alternatively, the compstatin analogue may comprise one of the following sequences:

[1364] [K*]GSAIC(1)IWQDWGEHRA(1)TEGE (analogue of Compound 100)

[1365] ASGEYC(1)l[1-Me-Trp]QDWGEHRA(1)[Sar]EGE-[K*] (analogue of Compound 113)

[1366] EFC(1)1[1-Me-Trp]QDWGEHRA(1)EGE-[K*] (analogue of Compound 134, 161)

[1367] EGSAIC(1)IWQDWGEHRA(1)TEG[K*] (analogue of Compound 101)

[1368] EGSAYC(1)1[1-Me-Trp]QDWGEH[K*]A(1)[Sar]E (analogue of Compound 103)

[1369] EGSAYC(1)1[1-Me-Trp]QDWGEHRA(1)[Sar]EG-[K*] (analogue of Compound 104)

[1370] EGSAYC(1)1[1-Me-Trp]QDWGEHRA(1)[Sar]EGE-[K*] (analogue of Compound 109)

[1371] EGSAYC(1)I[1-Me-Trp]QDWGEHRA(1)[Sar]EGK-[K*] (analogue of Compound 110)

[1372] EGSAYC(1)1[1-Me-Trp]QDWGEHRA(1)[Sar]EK[γGlu]-[K*] (analogue of Compound 111, 159)

[1373] FC(1)1[1-Me-Trp]QDWGEHRA(1)TGAES-[K*] (analogue of Compound 102)

[1374] IC(1)IWQDWGEHRA(1)TEG-[K*] (analogue of Compound 92)

[1375] IC(1)IWQDWGEHRA(1)TEGE-[K*] (analogue of Compound 94)

[1376] SAYC(1)1[1-Me-Trp]QDWGEHRA(1)[Sar]E-[K*] (analogue of Compound 105)

[1377] SEFC(1)1[1-Me-Trp]QDWGEHRA(1)[Sar]EGA-[K*] (analogue of Compound 119, 154)

[1378] SEFC(1)I[1-Me-Trp]QDWGEHRA(1)[Sar]EGE[Peg3][Peg3]-[K*] (analogue of Compound 123,146and 152)

[1379] SEFC(1)l[1-Me-Trp]QDWGEHRA(1)[Sar]EGEGGG-[K*] (analogue of Compound 129)

[1380] SEFC(1)l[1-Me-Trp]QDWGEHRA(1)[Sar]EGE[Peg3]-[K*] (analogue of Compound 138)

[1381] SEFC(1)l[1-Me-Trp]QDWGEHRA(1)[Sar]EGE[Peg3]ES-[K*] (analogue of Compound 140)

[1382] SEFC(1)1[1-Me-Trp]QDWGEHRA(1)[Sar]EGE[Peg3][Peg3]-[K*] (analogue of Compound 127, 160)

[1383] SEFC(1)1[1-Me-Trp]QDWGEHRA(1)[Sar]EGESES-[K*] (analogue of Compound 139)

[1384] SEFC(1)1[1-Me-Trp]QDWGEHRA(1)[Sar]EK[γGlu]GGG-[K*] (analogue of Compound 132)

[1385] SEFC(1)1[1-Me-Trp]QDWGEHRA(1)TEGE[8-aminooctanoyl]-[K*] (analogue of Compound 136)

[1386] SEFC(1)l[1-Me-Trp]QDWGEHRA(1)TEGE[8-aminooctanoyl]E-[K*] (analogue of Compound 137)

[1387] SEFC(1)l[1-Me-Trp]QDWGEHRA(1)TEGEGGG-[K*] (analogue of Compound 130, 157)

[1388] SEFC(1)1[1-Me-Trp]QDWGEHRA(1)TEGE[Peg3]ES-[K*] (analogue of Compound 142, 148, 163, 165)

[1389] SEFC(1)I[1-Me-Trp]QDWGEHRA(1)TEGE[Peg3][Peg3]-[K*] (analogue of Compound 126, 156)

[1390] SEFC(1)1[1-Me-Trp]QDWGEHRA(1)TEK[γGlu]GGG-[K*] (analogue of Compound 133)

[1391] SEFC(1)l[1-Me-Trp]QDWGEHRA(1)TGAES-[K*] (analogue of Compound 135)

[1392] SEFC(1)I[1-Me-Trp]QEWGEHRA(1)[Sar]EGA-[K*] (analogue of Compound 120)

[1393] SEFC(1)I[1-Me-Trp]QEWGEHRA(1)[Sar]EGE[Peg3][Peg3]-[K*] (analogue of Compound 124, 153, 157)

[1394] SEYC(1)1[1-Me-Trp]QDWGEHRA(1)[Sar]EGA-[K*] (analogue of Compound 112)

[1395] SEYC(1)I[1-Me-Trp]QDWGEHRA(1)[Sar]EGE[Peg3][Peg3]-[K*] (analogue of Compound 117)

[1396] SEYC(1)1[1-Me-Trp]QDWGEHRA(1)[Sar]EGE-[K*] (analogue of Compound 114)

[1397] SEYC(1)l[1-Me-Trp]QEW[Sar]EHRA(1)[Sar]EK[γGlu]A-[K*] (analogue of Compound 121)

[1398] SEYC(1)I[1-Me-Trp]QEWGEHRA(1)[Sar]EGA-[K*] (analogue of Compound 122)

[1399] SEYC(1)I[1-Me-Trp]QEWGEHRA(1)[Sar]EGE[Peg3][Peg3]-[K*] (analogue of Compound 125)

[1400] EGSEYC(1)l[1-Me-Trp]QDWGEHRA(1)[Sar]E (analogue of Compound 107)

[1401] ESSAIC(1)IWQDWGEHRA(1)TEGE (analogue of Compound 99)

[1402] SEFC(1)1[1-Me-Trp]QDWGEHRA(1)[Sar]EGE[Peg3][Peg3][Peg3]-[K*] (analogue of Compound 143)

[1403] SEFC(1)1[1-Me-Trp]QDW[Sar]EHRA(1)[Sar]E[Peg3][Peg3]-[K*] (analogue of Compound 144, 147, 162, 164)

[1404] EFC(1)1[1-Me-Trp]QDWGEHRA(1)[Sar]EA[Peg3][Peg3]-[K*] (analogue of Compound 145)

[1405] GEFC(1)1[1-Me-Trp]QDW[Sar]EHRA(1)[Sar]EAE[Peg3][Peg3]-[K*] (analogue of Compound 149)

[1406] Ac-SEFC(1)I[1-Me-Trp]QDW[Sar]EHRA(1)[Sar]EGE[Peg3]ES-[K*] (analogue of Compound 150, 166)

[1407] GEFC(1)l[1-Me-Trp]QEWGEHRA(1)[Sar]EGE[Peg3]ES-[K*] (analogue of Compound 155)

[1408] EFC(1)[1-Me-Trp]QEWGEHRA(1)[Sar]EA[Peg3][Peg3]-[K*] (analogue of Compound 158)

[1409] wherein the side chains of residues designated C(1) and A(1) form a lanthionine bridge.

[1410] For example, the compstatin analogue may comprise one of the following sequences:

[1411] Ac-[K*]GSAIhC(1)IWQDWGEHRA(1)TEGE-NH2 (analogue of Compound 100)

[1412] Ac-ASGEYhC(1)1[1-Me-Trp]QDWGEHRA(1)[Sar]EGE-[K*]-NH2 (analogue of Compound 113)

[1413] Ac-EFhC(1)1[1-Me-Trp]QDWGEHRA(1)EGE-[K*]-NH2 (analogue of Compound 134, 161)

[1414] Ac-EGSAIhC(1)IWQDWGEHRA(1)TEG-[K*]-NH2 (analogue of Compound 101)

[1415] Ac-EGSAYhC(1)l[1-Me-Trp]QDWGEH[K*]A(1)[Sar]E-NH2 (analogue of Compound 103)

[1416] Ac-EGSAYhC(1)1[1-Me-Trp]QDWGEHRA(1)[Sar]EG-[K*]-NH2 (analogue of Compound 104)

[1417] Ac-EGSAYhC(1)l[1-Me-Trp]QDWGEHRA(1)[Sar]EGE-[K*]-NH2 (analogue of Compound 109)

[1418] Ac-EGSAYhC(1)1[1-Me-Trp]QDWGEHRA(1)[Sar]EGK-[K*]-NH2 (analogue of Compound 110)

[1419] Ac-EGSAYhC(1)1[1-Me-Trp]QDWGEHRA(1)[Sar]EK[γGlu]-[K*]-NH2 (analogue of Compound 111, 159)

[1420] Ac-FhC(1)l[1-Me-Trp]QDWGEHRA(1)TGAES-[K*]-NH2 (analogue of Compound 102)

[1421] Ac-IhC(1)IWQDWGEHRA(1)TEG-[K*]-NH2 (analogue of Compound 92, 93, 95, 96, 98)

[1422] Ac-IhC(1)IWQDWGEHRA(1)TEGE-[K*]-NH2 (analogue of Compound 94, 97)

[1423] Ac-SAYhC(1)1[1-Me-Trp]QDWGEHRA(1)[Sar]E-[K*]-NH2 (analogue of Compound 105, 106)

[1424] Ac-SEFhC(1)1[1-Me-Trp]QDWGEHRA(1)[Sar]EGA-[K*]-NH2 (analogue of Compound 119, 154)

[1425] Ac-SEFhC(1)1[1-Me-Trp]QDWGEHRA(1)[Sar]EGE[Peg3][Peg3]-[K*]-NH2 (Compound 152; analogue of Compound 123, 146)

[1426] Ac-SEFhC(1)1[1-Me-Trp]QDWGEHRA(1)[Sar]EGEGGG-[K*]-NH2 (analogue of Compound 129)

[1427] Ac-SEFhC(1)1[1-Me-Trp]QDWGEHRA(1)[Sar]EGE[Peg3]-[K*]-NH2 (analogue of Compound 138)

[1428] Ac-SEFhC(1)[1-Me-Trp]QDWGEHRA(1)[Sar]EGE[Peg3]ES-[K*]-NH2 (analogue of Compound 140)

[1429] Ac-SEFhC(1)1[1-Me-Trp]QDWGEHRA(1)[Sar]EGE[Peg3][Peg3]-[K*]-NH2 (analogue of Compound 127, 128,160)

[1430] Ac-SEFhC(1)1[1-Me-Trp]QDWGEHRA(1)[Sar]EGESES-[K*]-NH2 (analogue of Compound 139, 141)

[1431] Ac-SEFhC(1)l[1-Me-Trp]QDWGEHRA(1)[Sar]EK[γGlu]GGG-[K*]-NH2 (analogue of Compound 132)

[1432] Ac-SEFhC(1)1[1-Me-Trp]QDWGEHRA(1)TEGE[8-aminooctanoyl]-[K*]-NH2 (analogue of Compound 136)

[1433] Ac-SEFhC(1)I[1-Me-Trp]QDWGEHRA(1)TEGE[8-aminooctanoyl]E-[K*]-NH2 (analogue of Compound 137)

[1434] Ac-SEFhC(1)1[1-Me-Trp]QDWGEHRA(1)TEGEGGG-[K*]-NH2 (analogue of Compound 130, 131, 157)

[1435] Ac-SEFhC(1)l[1-Me-Trp]QDWGEHRA(1)TEGE-[Peg3]ES-[K*]-NH2 (Compound 165; analogue of Compound 142, 148)

[1436] Ac-SEFhC(1)1[1-Me-Trp]QDWGEHRA(1)TEGE-[Peg3]ES-[K*]-OH (analogue of Compound 163)

[1437] Ac-SEFhC(1)1[1-Me-Trp]QDWGEHRA(1)TEGE-[Peg3][Peg3]-[K*]-NH2 (analogue of Compound 126, 156)

[1438] Ac-SEFhC(1)1[1-Me-Trp]QDWGEHRA(1)TEK[γGlu]GGG-[K*]-NH2 (analogue of Compound 133)

[1439] Ac-SEFhC(1)l[1-Me-Trp]QDWGEHRA(1)TGAES-[K*]-NH2 (analogue of Compound 135)

[1440] Ac-SEFhC(1)1[1-Me-Trp]QEWGEHRA(1)[Sar]EGA-[K*]-NH2 (analogue of Compound 120)

[1441] Ac-SEFhC(1)1[1-Me-Trp]QEWGEHRA(1)[Sar]EGE[Peg3][Peg3]-[K*]-NH2 (Compound 167; analogue of Compound 124, 153)

[1442] Ac-SEYhC(1)l[1-Me-Trp]QDWGEHRA(1)[Sar]EGA-[K*]-NH2 (analogue of Compound 112, 118)

[1443] Ac-SEYhC(1)1[1-Me-Trp]QDWGEHRA(1)[Sar]EGE[Peg3][Peg3]-[K*]-NH2 (analogue of Compound 117)

[1444] Ac-SEYhC(1)l[1-Me-Trp]QDWGEHRA(1)[Sar]EGE-[K*]-NH2 (analogue of Compound 114, 115, 116)

[1445] Ac-SEYhC(1)l[1-Me-Trp]QEW[Sar]EHRA(1)[Sar]EK[γGlu]A-[K*]-NH2 (analogue of Compound 121)

[1446] Ac-SEYhC(1)1[1-Me-Trp]QEWGEHRA(1)[Sar]EGA-[K*]-NH2 (analogue of Compound 122)

[1447] Ac-SEYhC(1)l[1-Me-Trp]QEWGEHRA(1)[Sar]EGE[Peg3][Peg3]-[K*]-NH2 (analogue of Compound 125)

[1448] Φ-EGSEYhC(1)1[1-Me-Trp]QDWGEHRA(1)[Sar]E-NH2 (analogue of Compound 107, 108)

[1449] Φ-ESSAIhC(1)IWQDWGEHRA(1)TEGE-NH2 (analogue of Compound 99)

[1450] Ac-SEFhC(1)1[1-Me-Trp]QDWGEHRA(1)[Sar]EGE[Peg 3][Peg3][Peg3]-[K*]-NH2 (analogue of Compound 143)

[1451] Ac-SEFhC(1)1[1-Me-Trp]QDW[Sar]EHRA(1)[Sar]E[Peg3][Peg 3]-[K*]-NH2 (Compound 164; analogue of Compound 144, 147)

[1452] Ac-SEFhC(1)l[1-Me-Trp]QDW[Sar]EHRA(1)[Sar]E[Peg3][Peg3]-[K*]-OH (analogue of Compound 162)

[1453] Ac-EFhC(1)1[1-Me-Trp]QDWGEHRA(1)[Sar]EA[Peg3][Peg3]-[K*]-NH2 (analogue of Compound 145)

[1454] Ac-GEFhC(1)1[1-Me-Trp]QDW[Sar]EHRA(1)[Sar]EAE[Peg3][Peg3]-[K*]-NH2 (analogue of Compound 149)

[1455] Ac-SEFhC(1)l[1-Me-Trp]QDW[Sar]EHRA(1)[Sar]EGE[Peg3]ES-[K*]-NH2 (Compound 166; analogue of Compound 150)

[1456] Ac-GEFhC(1)1[1-Me-Trp]QEWGEHRA(1)[Sar]EGE[Peg3]ES-[K*]-NH2 (analogue of Compound 155)

[1457] Ac-EFhC(1)l[1-Me-Trp]QEWGEHRA(1)[Sar]EA[Peg31[Peg3]-[K*]-NH2 (analogue of Compound 158)

[1458] wherein the side chains of residues designated hC(1) and A(1) form a cystathionine bridge.

[1459] For example, the compstatin analogue may comprise one of the following sequences:

[1460] Ac-[K*]GSAIA(1)IWQDWGEHRhC(1)TEGE-NH2 (analogue of Compound 100)

[1461] Ac-ASGEYA(1)l[1-Me-Trp]QDWGEHRhC(1)[Sar]EGE-[K*]-NH2 (analogue of Compound 113)

[1462] Ac-EFA(1)1[1-Me-Trp]QDWGEHRhC(1)EGE-[K*]-NH2 (Compound 161; analogue of Compound 134)

[1463] Ac-EGSAIA(1)IWQDWGEHRhC(1)TEG-[K*]-NH2 (analogue of Compound 101)

[1464] Ac-EGSAYA(1)1[1-Me-Trp]QDWGEH[K*]hC(1)[Sar]E-NH2 (analogue of Compound 103)

[1465] Ac-EGSAYA(1)l[1-Me-Trp]QDWGEHRhC(1)[Sar]EG-[K*]-NH2 (analogue of Compound 104)

[1466] Ac-EGSAYA(1)1[1-Me-Trp]QDWGEHRhC(1)[Sar]EGE-[K*]-NH2 (analogue of Compound 109)

[1467] Ac-EGSAYA(1)l[1-Me-Trp]QDWGEHRhC(1)[Sar]EGK-[K*]-NH2 (analogue of Compound 110)

[1468] Ac-EGSAYA(1)l[1-Me-Trp]QDWGEHRhC(1)[Sar]EK[γGlu]-[K*]-NH2 (Compound 159; analogue of Compound 111)

[1469] Ac-FA(1)l[1-Me-Trp]QDWGEHRhC(1)TGAES-[K*]-NH2 (analogue of Compound 102)

[1470] Ac-IA(1)IWQDWGEHRhC(1)TEG-[K*]-NH2 (analogue of Compound 92, 93, 95, 96, 98)

[1471] Ac-IA(1)IWQDWGEHRhC(1)TEGE-[K*]-NH2 (analogue of Compound 94, 97)

[1472] Ac-SAYA(1)l[1-Me-Trp]QDWGEHRhC(1)[Sar]E-[K*]-NH2 (analogue of Compound 105, 106)

[1473] Ac-SEFA(1)l[1-Me-Trp]QDWGEHRhC(1)[Sar]EGA-[K*]-NH2 (Compound 154; analogue of Compound 119)

[1474] Ac-SEFA(1)1[1-Me-Trp]QDWGEHRhC(1)[Sar]EGE[Peg3][Peg3]-[K*]-NH2 (Compound 146; analogue of Compound 123, 152)

[1475] Ac-SEFA(1)1[1-Me-Trp]QDWGEHRhC(1)[Sar]EGEGGG-[K*]-NH2 (analogue of Compound 129)

[1476] Ac-SEFA(1)I[1-Me-Trp]QDWGEHRhC(1)[Sar]EGE[Peg3)-[K*]-NH2 (analogue of Compound 138)

[1477] Ac-SEFA(1)1[1-Me-Trp]QDWGEHRhC(1)[Sar]EGE[Peg3]ES-[K*]-NH2 (analogue of Compound 140)

[1478] Ac-SEFA(1)I[1-Me-Trp]QDWGEHRhC(1)[Sar]EGE[Peg3][Peg3]-[K*]-NH2 (Compound 160; analogue of Compound 127, 128)

[1479] Ac-SEFA(1)1[1-Me-Trp]QDWGEHRhC(1)[Sar]EGESES-[K*]-NH2 (analogue of Compound 139, 141)

[1480] Ac-SEFA(1)1[1-Me-Trp]QDWGEHRhC(1)[Sar]EK[γGlu]GGG-[K*]-NH2 (analogue of Compound 132)

[1481] Ac-SEFA(1)[1-Me-Trp]QDWGEHRhC(1)TEGE[8-aminooctanoyl]-[K*]-NH2 (analogue of Compound 136)

[1482] Ac-SEFA(1)1[1-Me-Trp]QDWGEHRhC(1)TEGE[8-aminooctanoyl]E-[K*]-NH2 (analogue of Compound 137)

[1483] Ac-SEFA(1)l[1-Me-Trp]QDWGEHRhC(1)TEGEGGG-[K*]-NH2 (Compound 157; analogue of Compound 130, 131)

[1484] Ac-SEFA(1)1[1-Me-Trp]QDWGEHRhC(1)TEGE-[Peg3]ES-[K*]-NH2 (Compound 148; analogue of Compound 142, 165)

[1485] Ac-SEFA(1)l[1-Me-Trp]QDWGEHRhC(1)TEGE-[Peg3]ES-[K*]-OH (Compound 163)

[1486] Ac-SEFA(1)I[1-Me-Trp]QDWGEHRhC(1)TEGE-[Peg3][Peg3]-[K*]-NH2 (Compound 156; analogue of Compound 126)

[1487] Ac-SEFA(1)I[1-Me-Trp]QDWGEHRhC(1)TEK[γGlu]GGG-[K*]-NH2 (analogue of Compound 133)

[1488] Ac-SEFA(1)1[1-Me-Trp]QDWGEHRhC(1)TGAES-[K*]-NH2 (analogue of Compound 135)

[1489] Ac-SEFA(1)1[1-Me-Trp]QEWGEHRhC(1)[Sar]EGA-[K*]-NH2 (analogue of Compound 120)

[1490] Ac-SEFA(1)1[1-Me-Trp]QEWGEHRhC(1)[Sar]EGE[Peg3][Peg3]-[K*]-NH2 (Compound 153; analogue of Compound 124, 167)

[1491] Ac-SEYA(1)l[1-Me-Trp]QDWGEHRhC(1)[Sar]EGA-[K*]-NH2 (analogue of Compound 112, 118)

[1492] Ac-SEYA(1)I[1-Me-Trp]QDWGEHRhC(1)[Sar]EGE[Peg3][Peg3]-[K*]-NH2 (analogue of Compound 117)

[1493] Ac-SEYA(1)I[1-Me-Trp]QDWGEHRhC(1)[Sar]EGE-[K*]-NH2 (analogue of Compound 114, 115, 116)

[1494] Ac-SEYA(1)l[1-Me-Trp]QEW[Sar]EHRhC(1)[Sar]EK[γGlu]A-[K*]-NH2 (analogue of Compound 121)

[1495] Ac-SEYA(1)I[1-Me-Trp]QEWGEHRhC(1)[Sar]EGA-[K*]-NH2 (analogue of Compound 122)

[1496] Ac-SEYA(1)1[1-Me-Trp]QEWGEHRhC(1)[Sar]EGE[Peg3][Peg3]-[K*]-NH2 (analogue of

[1497] Compound 125)

[1498] Φ-EGSEYA(1)I[1-Me-Trp]QDWGEHRhC(1)[Sar]E-NH2 (analogue of Compound 107, 108)

[1499] Φ-ESSAIA(1)IWQDWGEHRhC(1)TEGE-NH2 (analogue of Compound 99)

[1500] Ac-SEFA(1)1[1-Me-Trp]QDWGEHRhC(1)[Sar]EGE[Peg3][Peg3][Peg3]-[K*]-NH2 (analogue of Compound 143)

[1501] Ac-SEFA(1)[[1-Me-Trp]QDW[Sar]EHRhC(1)[Sar]E[Peg3][Peg3]-[K*]-NH2 (Compound 147; analogue of Compound 144, 164)

[1502] Ac-SEFA(1)l[1-Me-Trp]QDW[Sar]EHRhC(1)[Sar]E[Peg3][Peg3]-[K*]-OH (Compound 162)

[1503] Ac-EFA(1)1[1-Me-Trp]QDWGEHRhC(1)[Sar]EA[Peg3][Peg3]-[K*]-NH2 (analogue of Compound 145)

[1504] Ac-GEFA(1)[1-Me-Trp]QDW[Sar]EHRhC(1)[Sar]EAE[Peg3][Peg3]-[K*]-NH2 (Compound 149)

[1505] Ac-SEFA(1)1[1-Me-Trp]QDW[Sar]EHRhC(1)[Sar]EGE[Peg3]ES-[K*]-NH2 (Compound 150; analogue of Compound 166)

[1506] Ac-GEFA(1)1[1-Me-Trp]QEWGEHRhC(1)[Sar]EGE[Peg3]ES-[K*]-NH2 (Compound 155)

[1507] Ac-EFA(1)1[1-Me-Trp]QEWGEHRhC(1)[Sar]EA[Peg3][Peg3]-[K*]-NH2 (Compound 158)

[1508] wherein the side chains of residues designated A(1) and hC(1) form a cystathionine bridge.

[1509] For example, the compstatin analogue may comprise one of the following sequences:

[1510] Ac-[K*]GSAIC(1)IWQDWGEHRA(1)TEGE-NH2 (analogue of Compound 100)

[1511] Ac-ASGEYC(1)1[1-Me-Trp]QDWGEHRA(1)[Sar]EGE-[K*]-NH2 (analogue of Compound 113)

[1512] Ac-EFC(1)1[1-Me-Trp]QDWGEHRA(1)EGE-[K*]-NH2 (analogue of Compound 134, 161)

[1513] Ac-EGSAIC(1)IWQDWGEHRA(1)TEG-[K*]-NH2 (analogue of Compound 101)

[1514] Ac-EGSAYC(1)I[1-Me-Trp]QDWGEH[K*]A(1)[Sar]E-NH2 (analogue of Compound 103)

[1515] Ac-EGSAYC(1)1[1-Me-Trp]QDWGEHRA(1)[Sar]EG-[K*]-NH2 (analogue of Compound 104)

[1516] Ac-EGSAYC(1)l[1-Me-Trp]QDWGEHRA(1)[Sar]EGE-[K*]-NH2 (analogue of Compound 109)

[1517] Ac-EGSAYC(1)l[1-Me-Trp]QDWGEHRA(1)[Sar]EGK-[K*]-NH2 (analogue of Compound 110)

[1518] Ac-EGSAYC(1)I[1-Me-Trp]QDWGEHRA(1)[Sar]EK[γGlu]-[K*]-NH2 (analogue of Compound 111, 159)

[1519] Ac-FC(1)1[1-Me-Trp]QDWGEHRA(1)TGAES-[K*]-NH2 (analogue of Compound 102)

[1520] Ac-IC(1)IWQDWGEHRA(1)TEG-[K*]-NH2 (analogue of Compound 92, 93, 95, 96, 98)

[1521] Ac-IC(1)IWQDWGEHRA(1)TEGE-[K*]-NH2 (analogue of Compound 94, 97)

[1522] Ac-SAYC(1)l[1-Me-Trp]QDWGEHRA(1)[Sar]E-[K*]-NH2 (analogue of Compound 105, 106)

[1523] Ac-SEFC(1)1[1-Me-Trp]QDWGEHRA(1)[Sar]EGA-[K*]-NH2 (analogue of Compound 119, 154)

[1524] Ac-SEFC(1)[1-Me-Trp]QDWGEHRA(1)[Sar]EGE[Peg3][Peg3]-[K*]-NH2 (analogue of Compound 123, 146 and 152)

[1525] Ac-SEFC(1)l[1-Me-Trp]QDWGEHRA(1)[Sar]EGEGGG-[K*]-NH2 (analogue of Compound 129)

[1526] Ac-SEFC(1)1[1-Me-Trp]QDWGEHRA(1)[Sar]EGE[Peg3]-[K*]-NH2 (analogue of Compound 138)

[1527] Ac-SEFC(1)l[1-Me-Trp]QDWGEHRA(1)[Sar]EGE[Peg3]ES-[K*]-NH2 (analogue of Compound 140)

[1528] Ac-SEFC(1)[1-Me-Trp]QDWGEHRA(1)[Sar]EGE[Peg3][Peg3]-[K*]-NH2 (analogue of Compound 127, 128, 160)

[1529] Ac-SEFC(1)I[1-Me-Trp]QDWGEHRA(1)[Sar]EGESES-[K*]-NH2 (analogue of Compound 139, 141)

[1530] Ac-SEFC(1)1[1-Me-Trp]QDWGEHRA(1)[Sar]EK[γGlu]GGG-[K*]-NH2 (analogue of Compound 132)

[1531] Ac-SEFC(1)1[1-Me-Trp]QDWGEHRA(1)TEGE[8-aminooctanoyl]-[K*]-NH2 (analogue of Compound 136)

[1532] Ac-SEFC(1)1[1-Me-Trp]QDWGEHRA(1)TEGE[8-aminooctanoyl]E-[K*]-NH2 (analogue of Compound 137)

[1533] Ac-SEFC(1)1[1-Me-Trp]QDWGEHRA(1)TEGEGGG-[K*]-NH2 (analogue of Compound 130, 131, 157)

[1534] Ac-SEFC(1)1[1-Me-Trp]QDWGEHRA(1)TEGE-[Peg3]ES-[K*]-NH2 (analogue of Compound 142, 148, 165)

[1535] Ac-SEFC(1)1[1-Me-Trp]QDWGEHRA(1)TEGE-[Peg3]ES-[K*]-NH2 (analogue of Compound 163)

[1536] Ac-SEFC(1)1[1-Me-Trp]QDWGEHRA(1)TEGE-[Peg3][Peg3]-[K*]-NH2 (analogue of Compound 126, 156)

[1537] Ac-SEFC(1)1[1-Me-Trp]QDWGEHRA(1)TEK[γGlu]GGG-[K*]-NH2 (analogue of Compound 133)

[1538] Ac-SEFC(1)l[1-Me-Trp]QDWGEHRA(1)TGAES-[K*]-NH2 (analogue of Compound 135)

[1539] Ac-SEFC(1)I[1-Me-Trp]QEWGEHRA(1)[Sar]EGA-[K*]-NH2 (analogue of Compound 120)

[1540] Ac-SEFC(1)l[1-Me-Trp]QEWGEHRA(1)[Sar]EGE[Peg3][Peg3]-[K*]-NH2 (analogue of Compound 124, 153, 167)

[1541] Ac-SEYC(1)l[1-Me-Trp]QDWGEHRA(1)[Sar]EGA-[K*]-NH2 (analogue of Compound 112, 118)

[1542] Ac-SEYC(1)1[1-Me-Trp]QDWGEHRA(1)[Sar]EGE[Peg3][Peg3]-[K*]-NH2 (analogue of Compound 117)

[1543] Ac-SEYC(1)l[1-Me-Trp]QDWGEHRA(1)[Sar]EGE-[K*]-NH2 (analogue of Compound 114, 115, 116)

[1544] Ac-SEYC(1)I[1-Me-Trp]QEW[Sar]EHRA(1)[Sar]EK[γGlu]A-[K*]-NH2 (analogue of Compound 121)

[1545] Ac-SEYC(1)I[1-Me-Trp]QEWGEHRA(1)[Sar]EGA-[K*]-NH2 (analogue of Compound 122)

[1546] Ac-SEYC(1)1[1-Me-Trp]QEWGEHRA(1)[Sar]EGE[Peg3][Peg3]-[K*]-NH2 (analogue of Compound 125)

[1547] Φ-EGSEYC(1)l[1-Me-Trp]QDWGEHRA(1)[Sar]E-NH2 (analogue of Compound 107, 108)

[1548] Φ-ESSAIC(1)IWQDWGEHRA(1)TEGE-NH2 (analogue of Compound 99)

[1549] Ac-SEFC(1)l[1-Me-Trp]QDWGEHRA(1)[Sar]EGE[Peg3][Peg3][Peg3]-[K*]-NH2 (analogue of Compound 143)

[1550] Ac-SEFC(1)1[1-Me-Trp]QDW[Sar]EHRA(1)(Sar]E[Peg3][Peg3]-[K*]-NH2 (analogue of Compound 144, 147, 164)

[1551] Ac-SEFC(1)1[1-Me-Trp]QDW[Sar]EHRA(1)[Sar]E[Peg3][Peg3]-[K*]-OH (analogue of Compound 162)

[1552] Ac-EFC(1)1[1-Me-Trp]QDWGEHRA(1)[Sar]EA[Peg3][Peg3]-[K*]-NH2 (analogue of Compound 145)

[1553] Ac-GEFC(1)1[1-Me-Trp]QDW[Sar]EHRA(1)[Sar]EAE[Peg3][Peg3]-[K*]-NH2 (analogue of Compound 149)

[1554] Ac-SEFC(1)1[1-Me-Trp]QDW[Sar]EHRA(1)[Sar]EGE[Peg3]ES-[K*]-NH2 (analogue of Compound 150, 166)

[1555] Ac-GEFC(1)1[1-Me-Trp]QEWGEHRA(1)[Sar]EGE[Peg3]ES-[K*]-NH2 (analogue of Compound 155)

[1556] Ac-EFC(1)1[1-Me-Trp]QEWGEHRA(1)[Sar]EA[Peg3][Peg3]-[K*]-NH2 (analogue of Compound 158) wherein the side chains of residues designated C(1) and A(1) form a lanthionine bridge.

[1557] For example, the compstatin analogue may be:

[1558] Ac-IhC(1)IWQDWGEHRA(1)TEG-K([15-carboxy-pentadecanoyl][γGlu])-NH2 (analogue of Compound 92)

[1559] Ac-IhC(1)IWQDWGEHRA(1)TEG-K([15-carboxy-pentadecanoyl][γGlu][Peg3][Peg3])-NH2 (analogue of Compound 93)

[1560] Ac-IhC(1)IWQDWGEHRA(1)TEGE-K([15-carboxy-pentadecanoyl][γGlu][Peg3][Peg3])-NH2 (analogue of Compound 94)

[1561] Ac-IhC(1)IWQDWGEHRA(1)TEG-K((15-carboxy-pentadecanoyl)-[(Piperazine-1-yl)-acetyl][Peg3][Peg3])-NH2 (analogue of Compound 95)

[1562] Ac-IhC(1)IWQDWGEHRA(1)TEG-K([17-carboxy-heptadecanoyl][γGlu][Peg3][Peg3])-NH2 (analogue of Compound 96)

[1563] Ac-IhC(1)IWQDWGEHRA(1)TEGE-K([17-carboxy-heptadecanoyl][γGlu][Peg3][Peg3])-NH2 (analogue of Compound 97)

[1564] Ac-IhC(1)IWQDWGEHRA(1)TEG-K([19-carboxy-nonadecanoyl][γGlu][Peg3][Peg3])-NH2 (analogue of Compound 98)

[1565] [15-Carboxy-pentadecanoyl]-ESSAIhC(1)IWQDWGEHRA(1)TEGE-NH2 (analogue of Compound 99)

[1566] Ac-[K([15-carboxy-pentadecanoyl][γGlu][Peg3][Peg3])]-GSAIhC(1)IWQDWGEHRA(1)TEGE-NH2 (analogue of Compound 100)

[1567] Ac-EGSAIhC(1)IWQDWGEHRA(1)TEG-K([15-carboxy-pentadecanoyl][γGlu])-NH2 (analogue of Compound 101)

[1568] Ac-FhC(1)1[1-Me-Trp]QDWGEHRA(1)TGAES-K([15-carboxy-pentadecanoyl][γGlu][Peg3][Peg3])-NH2 (analogue of Compound 102)

[1569] Ac-EGSAYhC(1)1[1-Me-Trp]QDWGEH-K([15-carboxy-pentadecanoyl][γGlu][Peg3][Peg3])—

[1570] A(1)[Sar]E-NH2 (analogue of Compound 103)

[1571] Ac-EGSAYhC(1)I[1-Me-Trp]QDWGEHRA(1)[Sar]EG-K([15-carboxy-pentadecanoyl][γGlu][Peg3][Peg3])-NH2 (analogue of Compound 104)

[1572] Ac-SAYhC(1)1[1-Me-Trp]QDWGEHRA(1)[Sar]E-K([17-carboxy-heptadecanoyl][γGlu]KG[γGlu])-NH2 (analogue of Compound 105)

[1573] Ac-SAYhC(1)I[1-Me-Trp]QDWGEHRA(1)[Sar]E-K([17-carboxy-heptadecanoyl][γGlu]G[γGlu])-NH2 (analogue of Compound 106)

[1574] [15-Carboxy-pentadecanoyl]-EGSEYhC(1)1[1-Me-Trp]QDWGEHRA(1)[Sar]E-NH2 (analogue of Compound 107)

[1575] [17-Carboxy-heptadecanoyl]-EGSEYhC(1)1[1-Me-Trp]QDWGEHRA(1)[Sar]E-NH2 (analogue of Compound 108)

[1576] Ac-EGSAYhC(1)1[1-Me-Trp]QDWGEHRA(1)[Sar]EGE-K([17-carboxy-heptadecanoyl][γGlu]G[γGlu])-NH2 (analogue of Compound 109)

[1577] Ac-EGSAYhC(1)I[1-Me-Trp]QDWGEHRA(1)[Sar]EGK-K([17-carboxy-heptadecanoyl][γGlu]G[γGlu])-NH2 (analogue of Compound 110)

[1578] Ac-EGSAYhC(1)1[1-Me-Trp]QDWGEHRA(1)[Sar]EK([γGlu]-K([17-carboxy-heptadecanoyl][γGlu](peg3)(peg3))-NH2 (analogue of Compound 111, 159)

[1579] Ac-SEYhC(1)1[1-Me-Trp]QDWGEHRA(1)[Sar]EGA-K([17-carboxy-heptadecanoyl][γGlu]-G[γGlu])-NH2 (analogue of Compound 112)

[1580] Ac-ASGEYhC(1)1[1-Me-Trp]QDWGEHRA(1)[Sar]EGE-K([17-carboxy-heptadecanoyl][γGlu]-G[γGlu])-NH2 (analogue of Compound 113)

[1581] Ac-SEYhC(1)1[1-Me-Trp]QDWGEHRA(1)[Sar]EGE-K([17-carboxy-heptadecanoyl][γGlu]-G[γGlu])-NH2 (analogue of Compound 114)

[1582] Ac-SEYhC(1)1[1-Me-Trp]QDWGEHRA(1)[Sar]EGK-K([17-carboxy-heptadecanoyl][γGlu]-G[γGlu])-NH2 (analogue of Compound 115)

[1583] Ac-SEYhC(1)1[1-Me-Trp]QDWGEHRA(1)[Sar]EGE-K([17-carboxy-heptadecanoyl][γGlu]-K[γGlu])-NH2 (analogue of Compound 116)

[1584] Ac-SEYhC(1)1[1-Me-Trp]QDWGEHRA(1)[Sar]EGE[Peg3][Peg3]-K([17-carboxy-heptadecanoyl][γGlu]-G[γGlu])-NH2 (analogue of Compound 117)

[1585] Ac-SEYhC(1)l[1-Me-Trp]QDWGEHRA(1)[Sar]EGA-K([17-carboxy-heptadecanoyl]-[γGlu]G[Peg3][γGlu][Peg3])-NH2 (analogue of Compound 118)

[1586] Ac-SEFhC(1)1[1-Me-Trp]QDWGEHRA(1)[Sar]EGA-K([17-carboxy-heptadecanoyl-][γGlu]G[Peg3][γGlu][Peg3])-NH2 (analogue of Compound 119, 154)

[1587] Ac-SEFhC(1)l[1-Me-Trp]QEWGEHRA(1)[Sar]EGA-K([17-carboxy-heptadecanoyl]-[γGlu]G[Peg3][γGlu][Peg3])-NH2 (analogue of Compound 120)

[1588] Ac-SEYhC(1)l[1-Me-Trp]QEW[Sar]EHRA(1)[Sar]EK[γGlu]A-K([17-carboxy-heptadecanoyl]-[γGlu]G[Peg3][γGlu][Peg3])-NH2 (analogue of Compound 121)

[1589] Ac-SEYhC(1)I[1-Me-Trp]QEWGEHRA(1)[Sar]EGA-K([17-carboxy-heptadecanoyl]-[γGlu]G[Peg3][γGlu][Peg3])-NH2 (analogue of Compound 122)

[1590] Ac-SEFhC(1)1[1-Me-Trp]QDWGEHRA(1)[Sar]EGE[Peg3][Peg3]-K([17-carboxy-heptadecanoyl][γGlu]G[γGlu])-NH2 (Compound 152; analogue of Compound 123 and 146)

[1591] Ac-SEFhC(1)l[1-Me-Trp]QEWGEHRA(1)[Sar]EGE[Peg3[Peg3]-K([17-carboxy-heptadecanoyl]-[γGlu]G[γGlu])-NH2 (Compound 167; analogue of Compound 124, 153)

[1592] Ac-SEYhC(1)1[1-Me-Trp]QEWGEHRA(1)[Sar]EGE[Peg3][Peg3]-K([17-carboxy-heptadecanoyl][γGlu]G[γGlu])-NH2 (analogue of Compound 125)

[1593] Ac-SEFhC(1)1[1-Me-Trp]QDWGEHRA(1)TEGE[Peg3][Peg3]-K([17-carboxy-heptadecanoyl)[γGlu]G[γGlu]])-NH2 (analogue of Compound 126, 156)

[1594] Ac-SEFhC(1)l[1-Me-Trp]QDWGEHRA(1)[Sar]-EGE-[Peg3][Peg3]-K([15-carboxy-pentadecanoyl][γGlu]G[γGlu])-NH2 (analogue of Compound 127, 160)

[1595] Ac-SEFhC(1)1[1-Me-Trp]QDWGEHRA(1)[Sar]EGE[Peg3][Peg3]-K([19-carboxy-nonadecanoyl][γGlu]G[γGlu])-NH2 (analogue of Compound 128)

[1596] Ac-SEFhC(1)1[1-Me-Trp]QDWGEHRA(1)[Sar]EGEGGG-K([17-carboxy-heptadecanoyl]-[γGlu]G[γGlu))-NH2 (analogue of Compound 129)

[1597] Ac-SEFhC(1)1[1-Me-Trp]QDWGEHRA(1)TEGEGGG-K([17-carboxy-heptadecanoyl]-[γGlu]G[γGlu])-NH2 (analogue of Compound 130, 157)

[1598] Ac-SEFhC(1)1[1-Me-Trp]-QDWGEHRA(1)TEGEGGG-K([15-carboxy-pentadecanoyl][γGlu]-G[γGlu])-NH2 (analogue of Compound 131)

[1599] Ac-SEFhC(1)l[1-Me-Trp]-QDWGEHRA(1)[Sar]EK[γGlu]GGG-K([17-carboxy-heptadecanoyl][γGlu]-G[γGlu])-NH2 (analogue of Compound 132)

[1600] Ac-SEFhC(1)l[1-Me-Trp]QDWGEHRA(1)TEK[γGlu]GGG-K([17-carboxy-heptadecanoyl][γGlu]-G[γGlu])-NH2 (analogue of Compound 133)

[1601] Ac-EFhC(1)1[1-Me-Trp]QDWGEHRA(1)EGE-K([17-carboxy-heptadecanoyl][γGlu]G[γGlu])-NH2 (analogue of Compound 134, 161)

[1602] Ac-SEFhC(1)1[1-Me-Trp]QDWGEHRA(1)TGAES-K([15-carboxy-hexadecanoyl][γGlu]G[γGlu])-NH2 (analogue of Compound 135)

[1603] Ac-SEFhC(1)l[1-Me-Trp]QDWGEHRA(1)TEGE[8-aminooctanoyl]-K([17-carboxy-heptadecanoyl][γGlu]-G[γGlu])-NH2 (analogue of Compound 136)

[1604] Ac-SEFhC(1)l[1-Me-Trp]QDWGEHRA(1)TEGE[8-aminooctanoyl]E-K([17-carboxy-heptadecanoyl][γGlu]G[γGlu]])-NH2 (analogue of Compound 137)

[1605] Ac-SEFhC(1)1[1-Me-Trp]QDWGEHRA(1)[Sar]EGE[Peg3]-K([17-carboxy-heptadecanoyl]-[γGlu]G[γGlu])-NH2 (analogue of Compound 138)

[1606] Ac-SEFhC(1)1[1-Me-Trp]QDWGEHRA(1)[Sar]EGESES-K([17-carboxy-heptadecanoyl]-[γGlu]G[γGlu])-NH2 (analogue of Compound 139)

[1607] Ac-SEFhC(1)1[1-Me-Trp]QDWGEHRA(1)[Sar]EGE[Peg3]ES-K([17-carboxy-heptadecanoyl]-[γGlu]G[γGlu])-NH2 (analogue of Compound 140)

[1608] Ac-SEFhC(1)1[1-Me-Trp]QDWGEHRA(1)[Sar]EGESES-K([17-carboxy-heptadecanoyl][γGlu])-NH2 (analogue of Compound 141)

[1609] Ac-SEFhC(1)I[1-Me-Trp]QDWGEHRA(1)TEGE[Peg3]ES-K([17-carboxy-heptadecanoyl][γGlu])-NH2 (Compound 165; analogue of Compound 142 and 148)

[1610] Ac-SEFhC(1)l[1-Me-Trp]QDWGEHRA(1)TEGE[Peg3]ES-K([17-carboxy-heptadecanoyl][γGlu])-OH (analogue of Compound 163)

[1611] Ac-SEFhC(1)l[1-Me-Trp]QDWGEHRA(1)[Sar]EGE[Peg3][Peg3][Peg3]-K([17-carboxy-heptadecanoyl][γGlu]G[γGlu])-NH2 (analogue of Compound 143)

[1612] Ac-SEFhC(1)1[1-Me-Trp]QDW[Sar]EHRA(1)[Sar]E[Peg3][Peg3]-K([17-carboxy-heptadecanoyl][γGlu]G[γGlu])-NH2 (Compound 164; analogue of Compound 144 and 147)

[1613] Ac-SEFhC(1)I[1-Me-Trp]QDW[Sar]EHRA(1)[Sar]E[Peg3][Peg3]-K([17-carboxy-heptadecanoyl][γGlu]G[γGlu])-OH (analogue of Compound 162)

[1614] Ac-EFhC(1)I[1-Me-Trp]QDWGEHRA(1)[Sar]EA[Peg3][Peg3]-K([17-carboxy-heptadecanoyl][γGlu]G[γGlu])-NH2 (analogue of Compound 145)

[1615] Ac-GEFhC(1)1[1-Me-Trp]QDW[Sar]EHRA(1)[Sar]EAE[Peg3][Peg3]-K([17-Carboxy-heptadecanoyl][γGlu]G[γGlu])-NH2 (analogue of Compound 149)

[1616] Ac-SEFhC(1)1[1-Me-Trp]QDW[Sar]EHRA(1)[Sar]EGE[Peg3]ES-K([17-Carboxy-heptadecanoyl][γGlu]G[γGlu])-NH2 (Compound 166; analogue of Compound 150)

[1617] Ac-GEFhC(1)l[1-Me-Trp]QEWGEHRA(1)[Sar]EGE[Peg3]ES-K([17-Carboxy-heptadecanoyl][γGlu]G[γGlu])-NH2 (analogue of Compound 155)

[1618] Ac-EFhC(1)1[1-Me-Trp]QEWGEHRA(1)[Sar]EA[Peg3][Peg3]-K([17-Carboxy-heptadecanoyl][γGlu]G[γGlu])-NH2 (analogue of Compound 158)

[1619] wherein the side chains of residues designated hC(1) and A(1) form a cystathionine bridge.

[1620] For example, the compstatin analogue may be:

[1621] Ac-IA(1)IWQDWGEHRhC(1)TEG-K([15-carboxy-pentadecanoyl][γGlu])-NH2 (analogue of Compound 92)

[1622] Ac-IA(1)IWQDWGEHRhC(1)TEG-K([15-carboxy-pentadecanoyl][γGlu][Peg3][Peg3])-NH2 (analogue of Compound 93)

[1623] Ac-IA(1)IWQDWGEHRhC(1)TEGE-K([15-carboxy-pentadecanoyl][γGlu][Peg3][Peg3])-NH2 (analogue of Compound 94)

[1624] Ac-IA(1)IWQDWGEHRhC(1)TEG-K((15-carboxy-pentadecanoyl)-[(Piperazine-1-yl)-acetyl][Peg3][Peg3])-NH2 (analogue of Compound 95)

[1625] Ac-IA(1)IWQDWGEHRhC(1)TEG-K([17-carboxy-heptadecanoyl][γGlu][Peg3][Peg3])-NH2 (analogue of Compound 96)

[1626] Ac-IA(1)IWQDWGEHRhC(1)TEGE-K([17-carboxy-heptadecanoyl][γGlu][Peg3][Peg3])-NH2 (analogue of Compound 97)

[1627] Ac-IA(1)IWQDWGEHRhC(1)TEG-K([19-carboxy-nonadecanoyl][γGlu][Peg3][Peg3])-NH2 (analogue of Compound 98)

[1628] [15-Carboxy-pentadecanoyl]-ESSAIA(1)IWQDWGEHRhC(1)TEGE-NH2 (analogue of Compound 99)

[1629] Ac-[K([15-carboxy-pentadecanoyl][γGlu][Peg3][Peg3])]-GSAIA(1)IWQDWGEHRhC(1)TEGE-NH2 (analogue of Compound 100)

[1630] Ac-EGSAIA(1)IWQDWGEHRhC(1)TEG-K([15-carboxy-pentadecanoyl][γGlu])-NH2 (analogue of Compound 101)

[1631] Ac-FA(1)1[1-Me-Trp]QDWGEHRhC(1)TGAES-K([15-carboxy-pentadecanoyl][γGlu][Peg3][Peg3])-NH2 (analogue of Compound 102)

[1632] Ac-EGSAYA(1)1[1-Me-Trp]QDWGEH-K([15-carboxy-pentadecanoyl][γGlu][Peg3][Peg3])-hC(1)[Sar]E-NH2 (analogue of Compound 103)

[1633] Ac-EGSAYA(1)1[1-Me-Trp]QDWGEHRhC(1)[Sar]EG-K([15-carboxy-pentadecanoyl][γGlu][Peg3][Peg3])-NH2 (analogue of Compound 104)

[1634] Ac-SAYA(1)1[1-Me-Trp]QDWGEHRhC(1)[Sar]E-K([17-carboxy-heptadecanoyl][γGlu]KG[γGlu])-NH2 (analogue of Compound 105)

[1635] Ac-SAYA(1)1[1-Me-Trp]QDWGEHRhC(1)[Sar]E-K([17-carboxy-heptadecanoyl][γGlu]G[γGlu])-NH2 (analogue of Compound 106)

[1636] [15-Carboxy-pentadecanoyl]-EGSEYA(1)l[1-Me-Trp]QDWGEHRhC(1)[Sar]E-NH2 (analogue of Compound 107)

[1637] [17-Carboxy-heptadecanoyl]-EGSEYA(1)1[1-Me-Trp]QDWGEHRhC(1)[Sar]E-NH2 (analogue of Compound 108)

[1638] Ac-EGSAYA(1)1[1-Me-Trp]QDWGEHRhC(1)[Sar]EGE-K([17-carboxy-heptadecanoyl][γGlu]G[γGlu])-NH2 (analogue of Compound 109)

[1639] Ac-EGSAYA(1)l[1-Me-Trp]QDWGEHRhC(1)[Sar]EGK-K([17-carboxy-heptadecanoyl][γGlu]G[γGlu])-NH2 (analogue of Compound 110)

[1640] Ac-EGSAYA(1)1[1-Me-Trp]QDWGEHRhC(1)[Sar]EK([γGlu]-K([17-carboxy-heptadecanoyl][γGlu](peg3)(peg3))-NH2 (Compound 159; analogue of Compound 111)

[1641] Ac-SEYA(1)1[1-Me-Trp]QDWGEHRhC(1)[Sar]EGA-K([17-carboxy-heptadecanoyl][γGlu]-G[γGlu])-NH2 (analogue of Compound 112)

[1642] Ac-ASGEYA(1)1[1-Me-Trp]QDWGEHRhC(1)[Sar]EGE-K([17-carboxy-heptadecanoyl][γGlu]-G[γGlu])-NH2 (analogue of Compound 113)

[1643] Ac-SEYA(1)1[1-Me-Trp]QDWGEHRhC(1)[Sar]EGE-K([17-carboxy-heptadecanoyl][γGlu]-G[γGlu])-NH2 (analogue of Compound 114)

[1644] Ac-SEYA(1)1[1-Me-Trp]QDWGEHRhC(1)[Sar]EGK-K([17-carboxy-heptadecanoyl][γGlu]-G[γGlu])-NH2 (analogue of Compound 115)

[1645] Ac-SEYA(1)1[1-Me-Trp]QDWGEHRhC(1)[Sar]EGE-K([17-carboxy-heptadecanoyl][γGlu]-K[γGlu])-NH2 (analogue of Compound 116)

[1646] Ac-SEYA(1)I[1-Me-Trp]QDWGEHRhC(1)[Sar]EGE[Peg3][Peg3]-K([17-carboxy-heptadecanoyl][γGlu]-G[γGlu])-NH2 (analogue of Compound 117)

[1647] Ac-SEYA(1)1[1-Me-Trp]QDWGEHRhC(1)[Sar]EGA-K([17-carboxy-heptadecanoyl]-[γGlu]G[Peg3][γGlu][Peg3])-NH2 (analogue of Compound 118)

[1648] Ac-SEFA(1)1[1-Me-Trp]QDWGEHRhC(1)[Sar]EGA-K([17-carboxy-heptadecanoyl-][γGlu]G[Peg3][γGlu][Peg3])-NH2 (Compound 154; analogue of Compound 119)

[1649] Ac-SEFA(1)1[1-Me-Trp]QEWGEHRhC(1)[Sar]EGA-K([17-carboxy-heptadecanoyl]-[γGlu]G[Peg3][γGlu][Peg3])-NH2 (analogue of Compound 120)

[1650] Ac-SEYA(1)1[1-Me-Trp]QEW[Sar]EHRhC(1)[Sar]EK[γGlu]A-K([17-carboxy-heptadecanoyl]-[γGlu]G[Peg3][γGlu][Peg3])-NH2 (analogue of Compound 121)

[1651] Ac-SEYA(1)l[1-Me-Trp]QEWGEHRhC(1)[Sar]EGA-K([17-carboxy-heptadecanoyl]-[γGlu]G[Peg3][γGlu][Peg3])-NH2 (analogue of Compound 122)

[1652] Ac-SEFA(1)1[1-Me-Trp]QDWGEHRhC(1)[Sar]EGE[Peg3][Peg3]-K([17-carboxy-heptadecanoyl][γGlu]G[γGlu])-NH2 (Compound 146; analogue of Compound 123, 152)

[1653] Ac-SEFA(1)1[1-Me-Trp]QEWGEHRhC(1)[Sar]EGE[Peg3[Peg3]-K([17-carboxy-heptadecanoyl]-[γGlu]G[γGlu])-NH2 (Compound 153; analogue of Compound 124, 167)

[1654] Ac-SEYA(1)I[1-Me-Trp]QEWGEHRhC(1)[Sar]EGE[Peg3][Peg3]-K([17-carboxy-heptadecanoyl][γGlu]G[γGlu])-NH2 (analogue of Compound 125)

[1655] Ac-SEFA(1)1[1-Me-Trp]QDWGEHRhC(1)TEGE[Peg3][Peg3]-K([17-carboxy-heptadecanoyl)[γGlu]G[γGlu]])-NH2 (Compound 156; analogue of Compound 126)

[1656] Ac-SEFA(1)1[1-Me-Trp]QDWGEHRhC(1)[Sar]-EGE-[Peg3][Peg3]-K([15-carboxy-pentadecanoyl][γGlu]G[γGlu])-NH2 (Compound 160; analogue of Compound 127)

[1657] Ac-SEFA(1)1[1-Me-Trp]QDWGEHRhC(1)[Sar]EGE[Peg3][Peg3]-K([19-carboxy-nonadecanoyl][γGlu]G[γGlu])-NH2 (analogue of Compound 128)

[1658] Ac-SEFA(1)1[1-Me-Trp]QDWGEHRhC(1)[Sar]EGEGGG-K([17-carboxy-heptadecanoyl]-[γGlu]G[γGlu])-NH2 (analogue of Compound 129)

[1659] Ac-SEFA(1)l[1-Me-Trp]QDWGEHRhC(1)TEGEGGG-K([17-carboxy-heptadecanoyl]-[γGlu]G[γGlu])-NH2 (Compound 157; analogue of Compound 130)

[1660] Ac-SEFA(1)1[1-Me-Trp]-QDWGEHRhC(1)TEGEGGG-K([15-carboxy-pentadecanoyl][γGlu]-G[γGlu])-NH2 (analogue of Compound 131)

[1661] Ac-SEFA(1)1[1-Me-Trp]-QDWGEHRhC(1)[Sar]EK[γGlu]GGG-K([17-carboxy-heptadecanoyl][γGlu]-G[γGlu])-NH2 (analogue of Compound 132)

[1662] Ac-SEFA(1)l[1-Me-Trp]QDWGEHRhC(1)TEK[γGlu]GGG-K([17-carboxy-heptadecanoyl][γGlu]-G[γGlu])-NH2 (analogue of Compound 133)

[1663] Ac-EFA(1)1[1-Me-Trp]QDWGEHRhC(1)EGE-K([17-carboxy-heptadecanoyl][γGlu]G[γGlu])-NH2 (Compound 161; analogue of Compound 134)

[1664] Ac-SEFA(1)l[1-Me-Trp]QDWGEHRhC(1)TGAES-K([15-carboxy-hexadecanoyl][γGlu]G[γGlu])-NH2 (analogue of Compound 135)

[1665] Ac-SEFA(1)1[1-Me-Trp]QDWGEHRhC(1)TEGE[8-aminooctanoyl]-K([17-carboxy-heptadecanoyl][γGlu]-G[γGlu])-NH2 (analogue of Compound 136)

[1666] Ac-SEFA(1)1[1-Me-Trp]QDWGEHRhC(1)TEGE[8-aminooctanoyl]E-K([17-carboxy-heptadecanoyl][γGlu]G[γGlu]])-NH2 (analogue of Compound 137)

[1667] Ac-SEFA(1)1[1-Me-Trp]QDWGEHRhC(1)[Sar]EGE[Peg3]-K([17-carboxy-heptadecanoyl]-[γGlu]G[γGlu])-NH2 (analogue of Compound 138)

[1668] Ac-SEFA(1)1[1-Me-Trp]QDWGEHRhC(1)[Sar]EGESES-K([17-carboxy-heptadecanoyl]-[γGlu]G[γGlu])-NH2 (analogue of Compound 139)

[1669] Ac-SEFA(1)l[1-Me-Trp]QDWGEHRhC(1)[Sar]EGE[Peg3]ES-K([17-carboxy-heptadecanoyl]-[γGlu]G[γGlu])-NH2 (analogue of Compound 140)

[1670] Ac-SEFA(1)l[1-Me-Trp]QDWGEHRhC(1)[Sar]EGESES-K([17-carboxy-heptadecanoyl][γGlu])-NH2 (analogue of Compound 141)

[1671] Ac-SEFA(1)1[1-Me-Trp]QDWGEHRhC(1)TEGE[Peg3]ES-K([17-carboxy-heptadecanoyl][γGlu])-NH2 (Compound 148; analogue of Compound 142, 165)

[1672] Ac-SEFA(1)1[1-Me-Trp]QDWGEHRhC(1)TEGE[Peg3]ES-K([17-carboxy-heptadecanoyl][γGlu])-OH (Compound 163)

[1673] Ac-SEFA(1)1[1-Me-Trp]QDWGEHRhC(1)[Sar]EGE[Peg3][Peg3][Peg3]-K([17-carboxy-heptadecanoyl][γGlu]G[γGlu])-NH2 (analogue of Compound 143)

[1674] Ac-SEFA(1)1[1-Me-Trp]QDW[Sar]EHRhC(1)[Sar]E[Peg3][Peg3]-K([17-carboxy-heptadecanoyl][γGlu]G[γGlu])-NH2 (compound 147; analogue of Compound 144, 164)

[1675] Ac-SEFA(1)1[1-Me-Trp]QDW[Sar]EHRhC(1)[Sar]E[Peg3][Peg3]-K([17-carboxy-heptadecanoyl][γGlu]G[γGlu])-OH (Compound 162)

[1676] Ac-EFA(1)1[1-Me-Trp]QDWGEHRhC(1)[Sar]EA[Peg3][Peg3]-K([17-carboxy-heptadecanoyl][γGlu]G[γGlu])-NH2 (analogue of Compound 145)

[1677] Ac-GEFA(1)l[1-Me-Trp]QDW[Sar]EHRhC(1)[Sar]EAE[Peg3][Peg3]-K([17-Carboxy-heptadecanoyl][γGlu]G[γGlu])-NH2 (Compound 149)

[1678] Ac-SEFA(1)l[1-Me-Trp]QDW[Sar]EHRhC(1)[Sar]EGE[Peg3]ES-K([17-Carboxy-heptadecanoyl][γGlu]G[γGlu])-NH2 (Compound 150; analogue of Compound 166)

[1679] Ac-GEFA(1)l[1-Me-Trp]QEWGEHRhC(1)[Sar]EGE[Peg3]ES-K([17-Carboxy-heptadecanoyl][γGlu]G[γGlu])-NH2 (Compound 155)

[1680] Ac-EFA(1)1[1-Me-Trp]QEWGEHRhC(1)[Sar]EA[Peg3][Peg3]-K([17-Carboxy-heptadecanoyl][γGlu]G[γGlu])-NH2 (Compound 158)

[1681] wherein the side chains of residues designated A(1) and hC(1) form a cystathionine bridge.

[1682] For example, the compstatin analogue may be:

[1683] Ac-IC(1)IWQDWGEHRA(1)TEG-K([15-carboxy-pentadecanoyl][γGlu])-NH2 (analogue of Compound 92)

[1684] Ac-IC(1)IWQDWGEHRA(1)TEG-K([15-carboxy-pentadecanoyl][γGlu][Peg3][Peg3])-NH2 (analogue of Compound 93)

[1685] Ac-IC(1)IWQDWGEHRA(1)TEGE-K([15-carboxy-pentadecanoyl][γGlu][Peg3][Peg3])-NH2 (analogue of Compound 94)

[1686] Ac-IC(1)IWQDWGEHRA(1)TEG-K((15-carboxy-pentadecanoyl)-[(Piperazine-1-yl)-acetyl][Peg3][Peg3])-NH2 (analogue of Compound 95)

[1687] Ac-IC(1)IWQDWGEHRA(1)TEG-K([17-carboxy-heptadecanoyl][γGlu][Peg3][Peg3])-NH2 (analogue of Compound 96)

[1688] Ac-IC(1)IWQDWGEHRA(1)TEGE-K([17-carboxy-heptadecanoyl][γGlu][Peg3][Peg3])-NH2 (analogue of Compound 97)

[1689] Ac-IC(1)IWQDWGEHRA(1)TEG-K([19-carboxy-nonadecanoyl][γGlu][Peg3][Peg3])-NH2 (analogue of Compound 98)

[1690] [15-Carboxy-pentadecanoyl]-ESSAIC(1)IWQDWGEHRA(1)TEGE-NH2 (analogue of Compound 99)

[1691] Ac-[K([15-carboxy-pentadecanoyl][γGlu][Peg3][Peg3])]-GSAIC(1)IWQDWGEHRA(1)TEGE-NH2 (analogue of Compound 100)

[1692] Ac-EGSAIC(1)IWQDWGEHRA(1)TEG-K([15-carboxy-pentadecanoyl][γGlu])-NH2 (analogue of Compound 101)

[1693] Ac-FC(1)1[1-Me-Trp]QDWGEHRA(1)TGAES-K([15-carboxy-pentadecanoyl][γGlu][Peg3][Peg3])-NH2 (analogue of Compound 102)

[1694] Ac-EGSAYC(1)I[1-Me-Trp]QDWGEH-K([15-carboxy-pentadecanoyl][γGlu][Peg3][Peg3])-A(1)[Sar]E-NH2 (analogue of Compound 103)

[1695] Ac-EGSAYC(1)l[1-Me-Trp]QDWGEHRA(1)[Sar]EG-K([15-carboxy-pentadecanoyl][γGlu][Peg3][Peg3])-NH2 (analogue of Compound 104)

[1696] Ac-SAYC(1)1[1-Me-Trp]QDWGEHRA(1)[Sar]E-K([17-carboxy-heptadecanoyl][γGlu]KG[γGlu])-NH2 (analogue of Compound 105)

[1697] Ac-SAYC(1)1[1-Me-Trp]QDWGEHRA(1)[Sar]E-K([17-carboxy-heptadecanoyl][γGlu]G[γGlu])-NH2 (analogue of Compound 106)

[1698] [15-Carboxy-pentadecanoyl]-EGSEYC(1)1[1-Me-Trp]QDWGEHRA(1)[Sar]E-NH2 (analogue of Compound 107)

[1699] [17-Carboxy-heptadecanoyl]-EGSEYC(1)1[1-Me-Trp]QDWGEHRA(1)[Sar]E-NH2 (analogue of Compound 108)

[1700] Ac-EGSAYC(1)l[1-Me-Trp]QDWGEHRA(1)[Sar]EGE-K([17-carboxy-heptadecanoyl][γGlu]G[γGlu])-NH2 (analogue of Compound 109)

[1701] Ac-EGSAYC(1)1[1-Me-Trp]QDWGEHRA(1)[Sar]EGK-K([17-carboxy-heptadecanoyl][γGlu]G[γGlu])-NH2 (analogue of Compound 110)

[1702] Ac-EGSAYC(1)1[1-Me-Trp]QDWGEHRA(1)[Sar]EK([γGlu]-K([17-carboxy-heptadecanoyl][γGlu](peg3)(peg3))-NH2 (analogue of Compound 111, 159)

[1703] Ac-SEYC(1)l[1-Me-Trp]QDWGEHRA(1)[Sar]EGA-K([17-carboxy-heptadecanoyl][γGlu]-G[γGlu])-NH2 (analogue of Compound 112)

[1704] Ac-ASGEYC(1)1[1-Me-Trp]QDWGEHRA(1)[Sar]EGE-K([17-carboxy-heptadecanoyl][γGlu]-G[γGlu])-NH2 (analogue of Compound 113)

[1705] Ac-SEYC(1)1[1-Me-Trp]QDWGEHRA(1)[Sar]EGE-K([17-carboxy-heptadecanoyl][γGlu]-G[γGlu])-NH2 (analogue of Compound 114)

[1706] Ac-SEYC(1)1[1-Me-Trp]QDWGEHRA(1)[Sar]EGK-K([17-carboxy-heptadecanoyl][γGlu]-G[γGlu])-NH2 (analogue of Compound 115)

[1707] Ac-SEYC(1)1[1-Me-Trp]QDWGEHRA(1)[Sar]EGE-K([17-carboxy-heptadecanoyl][γGlu]-K[γGlu])-NH2 (analogue of Compound 116)

[1708] Ac-SEYC(1)l[1-Me-Trp]QDWGEHRA(1)[Sar]EGE[Peg3][Peg3]-K([17-carboxy-heptadecanoyl][γGlu]-G[γGlu])-NH2 (analogue of Compound 117)

[1709] Ac-SEYC(1)1[1-Me-Trp]QDWGEHRA(1)[Sar]EGA-K([17-carboxy-heptadecanoyl]-[γGlu]G[Peg3][γGlu][Peg3])-NH2 (analogue of Compound 118)

[1710] Ac-SEFC(1)1[1-Me-Trp]QDWGEHRA(1)[Sar]EGA-K([17-carboxy-heptadecanoyl-][γGlu]G[Peg3][γGlu][Peg3])-NH2 (analogue of Compound 119, 154)

[1711] Ac-SEFC(1)l[1-Me-Trp]QEWGEHRA(1)[Sar]EGA-K([17-carboxy-heptadecanoyl]-[γGlu]G[Peg3][γGlu][Peg3])-NH2 (analogue of Compound 120)

[1712] Ac-SEYC(1)1[1-Me-Trp]QEW[Sar]EHRA(1)[Sar]EK[γGlu]A-K([17-carboxy-heptadecanoyl]-[γGlu]G[Peg3][γGlu][Peg3])-NH2 (analogue of Compound 121)

[1713] Ac-SEYC(1)I[1-Me-Trp]QEWGEHRA(1)[Sar]EGA-K([17-carboxy-heptadecanoyl]-[γGlu]G[Peg3][γGlu][Peg3])-NH2 (analogue of Compound 122)

[1714] Ac-SEFC(1)I[1-Me-Trp]QDWGEHRA(1)[Sar]EGE[Peg3][Peg3]-K([17-carboxy-heptadecanoyl][γGlu]G[γGlu])-NH2 (analogue of Compound 123, 146 and 152)

[1715] Ac-SEFC(1)1[1-Me-Trp]QEWGEHRA(1)[Sar]EGE[Peg3[Peg3]-K([17-carboxy-heptadecanoyl]-[γGlu]G[γGlu])-NH2 (analogue of Compound 124, 153, 167)

[1716] Ac-SEYC(1)1[1-Me-Trp]QEWGEHRA(1)[Sar]EGE[Peg3][Peg3]-K([17-carboxy-heptadecanoyl][γGlu]G[γGlu])-NH2 (analogue of Compound 125)

[1717] Ac-SEFC(1)1[1-Me-Trp]QDWGEHRA(1)TEGE[Peg3][Peg3]-K([17-carboxy-heptadecanoyl)[γGlu]G[γGlu]])-NH2 (analogue of Compound 126, 156)

[1718] Ac-SEFC(1)l[1-Me-Trp]QDWGEHRA(1)[Sar]-EGE-[Peg3][Peg3]-K([15-carboxy-pentadecanoyl][γGlu]G[γGlu])-NH2 (analogue of Compound 127, 160)

[1719] Ac-SEFC(1)1[1-Me-Trp]QDWGEHRA(1)[Sar]EGE[Peg3][Peg3]-K([19-carboxy-nonadecanoyl][γGlu]G[γGlu])-NH2 (analogue of Compound 128)

[1720] Ac-SEFC(1)1[1-Me-Trp]QDWGEHRA(1)[Sar]EGEGGG-K([17-carboxy-heptadecanoyl]-[γGlu]G[γGlu])-NH2 (analogue of Compound 129)

[1721] Ac-SEFC(1)l[1-Me-Trp]QDWGEHRA(1)TEGEGGG-K([17-carboxy-heptadecanoyl]-[γGlu]G[γGlu])-NH2 (analogue of Compound 130, 157)

[1722] Ac-SEFC(1)1[1-Me-Trp]-QDWGEHRA(1)TEGEGGG-K([15-carboxy-pentadecanoyl][γGlu]-G[γGlu])-NH2 (analogue of Compound 131)

[1723] Ac-SEFC(1)l[1-Me-Trp]-QDWGEHRA(1)[Sar]EK[γGlu]GGG-K([17-carboxy-heptadecanoyl][γGlu]-G[γGlu])-NH2 (analogue of Compound 132)

[1724] Ac-SEFC(1)1[1-Me-Trp]QDWGEHRA(1)TEK[γGlu]GGG-K([17-carboxy-heptadecanoyl][γGlu]-G[γGlu])-NH2 (analogue of Compound 133)

[1725] Ac-EFC(1)1[1-Me-Trp]QDWGEHRA(1)EGE-K([17-carboxy-heptadecanoyl][γGlu]G[γGlu])-NH2 (analogue of Compound 134, 161)

[1726] Ac-SEFC(1)1[1-Me-Trp]QDWGEHRA(1)TGAES-K([15-carboxy-hexadecanoyl][γGlu]G[γGlu])-NH2 (analogue of Compound 135)

[1727] Ac-SEFC(1)1[1-Me-Trp]QDWGEHRA(1)TEGE[8-aminooctanoyl]-K([17-carboxy-heptadecanoyl][γGlu]-G[γGlu])-NH2 (analogue of Compound 136)

[1728] Ac-SEFC(1)1[1-Me-Trp]QDWGEHRA(1)TEGE[8-aminooctanoyl]E-K([17-carboxy-heptadecanoyl][γGlu]G[γGlu]])-NH2 (analogue of Compound 137)

[1729] Ac-SEFC(1)1[1-Me-Trp]QDWGEHRA(1)[Sar]EGE[Peg3]-K([17-carboxy-heptadecanoyl]-[γGlu]G[γGlu])-NH2 (analogue of Compound 138)

[1730] Ac-SEFC(1)1[1-Me-Trp]QDWGEHRA(1)[Sar]EGESES-K([17-carboxy-heptadecanoyl]-[γGlu]G[γGlu])-NH2 (analogue of Compound 139)

[1731] Ac-SEFC(1)1[1-Me-Trp]QDWGEHRA(1)[Sar]EGE[Peg3]ES-K([17-carboxy-heptadecanoyl]-[γGlu]G[γGlu])-NH2 (analogue of Compound 140)

[1732] Ac-SEFC(1)1[1-Me-Trp]QDWGEHRA(1)[Sar]EGESES-K([17-carboxy-heptadecanoyl][γGlu])-NH2 (analogue of Compound 141)

[1733] Ac-SEFC(1)1[1-Me-Trp]QDWGEHRA(1)TEGE[Peg3]ES-K([17-carboxy-heptadecanoyl][γGlu])-NH2 (analogue of Compound 142, 148, 165)

[1734] Ac-SEFC(1)l[1-Me-Trp]QDWGEHRA(1)TEGE[Peg3]ES-K([17-carboxy-heptadecanoyl][γGlu])-OH (analogue of Compound 163)

[1735] Ac-SEFC(1)l[1-Me-Trp]QDWGEHRA(1)[Sar]EGE[Peg3][Peg3][Peg3]-K([17-carboxy-heptadecanoyl][γGlu]G[γGlu])-NH2 (analogue of Compound 143)

[1736] Ac-SEFC(1)1[1-Me-Trp]QDW[Sar]EHRA(1)[Sar]E[Peg3][Peg3]-K([17-carboxy-heptadecanoyl][γGlu]G[γGlu])-NH2 (analogue of Compound 144, 147, 164)

[1737] Ac-SEFC(1)1[1-Me-Trp]QDW[Sar]EHRA(1)[Sar]E[Peg3][Peg3]-K([17-carboxy-heptadecanoyl][γGlu]G[γGlu])-NH2 (analogue of Compound 162)

[1738] Ac-EF[C(1)1[1-Me-Trp]QDWGEHRA(1)[Sar]EA[Peg3][Peg3]-K([17-carboxy-heptadecanoyl][γGlu]G[γGlu])-NH2 (analogue of Compound 145)

[1739] Ac-GEFC(1)1[1-Me-Trp]QDW[Sar]EHRA(1)[Sar]EAE[Peg3][Peg3]-K([17-Carboxy-heptadecanoyl][γGlu]G[γGlu])-NH2 (analogue of Compound 149)

[1740] Ac-SEFC(1)1[1-Me-Trp]QDW[Sar]EHRA(1)[Sar]EGE[Peg3]ES-K([17-Carboxy-heptadecanoyl][γGlu]G[γGlu])-NH2 (analogue of Compound 150, 166)

[1741] Ac-GEFC(1)l[1-Me-Trp]QEWGEHRA(1)[Sar]EGE[Peg3]ES-K([17-Carboxy-heptadecanoyl][γGlu]G[γGlu])-NH2 (analogue of Compound 155)

[1742] Ac-EFC(1)1[1-Me-Trp]QEWGEHRA(1)[Sar]EA[Peg3][Peg3]-K([17-Carboxy-heptadecanoyl][γGlu]G[γGlu])-NH2 (analogue of Compound 158)

[1743] wherein the side chains of residues designated C(1) and A(1) form a lanthionine bridge.

[1744] Compstatin analogues made in the prior art have been shown to possess improved activity as compared with the parent peptide, i.e., up to about 99-fold (Mallik, B. et al, 2005, supra; WO 2004/026328), and up to about 264-fold (Katragadda et al., 2006, supra; WO2007/062249).

[1745] In accordance with the present invention, information about the biological and physico-chemical characteristics of Ac-compstatin binding to C3 have been employed to design compstatin analogues with significantly improved activity compared to the parent compstatin analogues.

[1746] Preferably, the compstatin analogs have greater activity than Ac-compstatin, e.g. at least 10-fold greater activity, at least 20-fold greater activity, at least 30-fold greater activity than Ac-compstatin. In other embodiments, the analogs have at least 40-, 50-, 60-, 70-, 80-, 90-, 100-, 110-, 120-, 130-, 140-, 150-fold or greater activity than Ac-compstatin, as compared utilizing the assays described in the examples.

[1747] A compound of the invention typically has greater activity than an otherwise identical compound having valine instead of isoleucine at the position corresponding to Val3 of compstatin.

[1748] The compstatin analogues are capable of binding to C3 and/or C3b, and of inhabiting activation of the complement cascade, particularly downstream of C3, e.g. by inhibiting cleavage of C3 by C3 convertases.

[1749] The compstatin analogues are also typically capable of inhibiting complement-driven haemolysis. Complement-driven haemolysis is typically assessed (in a “haemolysis assay”) by contacting serum from a first mammalian species (e.g. human serum) with erythrocytes (red blood cells; RBC) from a second mammalian species (e.g. sheep or any other suitable species), typically in the presence of mammalian immunoglobulin capable of binding to the erythrocytes. Complement in the serum is activated by the cell-bound immunoglobulin, leading to lysis of the erythrocytes, i.e. haemolysis. The immunoglobulin may be from the first species, or may be from a third mammalian species as long as it is capable of activating complement from the first species.

[1750] In such an assay, a test compound will typically be pre-incubated with the serum before the serum is contacted with the erythroctes. The erythrocytes may also be pre-incubated with the immunoglobulin before contacting with the serum.

[1751] In the examples below, human serum is pre-incubated with a test compound, and sheep erythroctes are pre-incubated with rabbit anti-serum against sheep erythrocytes, before the serum and erythrocytes are combined.

[1752] Thus, the activity of the compstatin analogues may be determined with reference to one or more biological activities selected from (1) binding to C3 protein, (2) binding to C3b protein, (3) inhibiting the cleavage of native C3 by C3 convertases, and (4) inhibiting the activation of the complement system.

[1753] Thus a compstatin analogue of the invention may bind C3 or C3b with a higher affinity than that of compstatin. For example, they may have a Kd at least 10-fold lower, at least 20-fold lower, or at least 30-fold lower than Ac-compstatin, e.g. at least 40-, 50-, 60-, 70-, 80-, 90-, 100-, 110-, 120-, 130-, 140-, or 150-fold lower than Ac-compstatin. The Kd may be determined by surface plasmon resonance (SPR), e.g. using an assay as described in Example 4.

[1754] A compstatin analogue of the invention typically binds C3 or C3b with a greater affinity (i.e. a lower Kd) than that of an otherwise identical compound having valine instead of isoleucine at the position corresponding to Val3 of compstatin.

[1755] A compstatin analogue of the invention may have a greater ability to inhibit haemolysis than Ac-compstatin. For example, it may inhibit haemolysis with an IC₅ at least 10-fold, at least 20-fold, or at least 30-fold lower than Ac-compstatin, e.g. at least 40-, 50-, 60-, 70-, 80-, 90-, 100-, 110-, 120-, 130-, 140-, 150-, 200-, 250-, 300-350-, 400-, 450-, 500-fold lower than Ac-compstatin.

[1756] A compstatin analogue of the invention typically has a greater ability to inhibit haemolysis (i.e. a lower IC₅₀) than an otherwise identical compound having valine instead of isoleucine at the position corresponding to Val3 of compstatin.

[1757] Preferably, the in vitro effect of the compounds of the present invention are assessed by measuring their inhibitory effect on the classical complement pathway in a haemolysis assay, e.g. using the assay described in Example 2.

[1758] Compstatin analogues having acylation may have a lower absolute activity than an otherwise identical compound lacking acylation, but have additional benefits including prolonged in vivo half life which may offset any apparent reduction of absolute activity.

[1759] Synthesis of Compstatin Analogues It is preferred to synthesize compstatin analogues of the present invention by means of solid-phase or liquid-phase peptide synthesis methodology. In this context, reference may be made to WO 98/11125 and, among many others, Fields, G. B. et al., 2002, “Principles and practice of solid-phase peptide synthesis”. In: Synthetic Peptides (2nd Edition), and the Examples herein.

[1760] Details regarding the synthesis and structures of compstatin analogues containing cystathionine and lanthionine bridges between the residues at positions X2 and X12 are provided in WO2012/040259, and in Knerr et al., ACS Chem Biol. 2011 July 15; 6(7): 753-760 (DOI:10.1021/cb2000378). Further relevant details regarding cystathionine and lanthionine chemistry can be found in de Araujo et al., 2014, Nature Communications; 5:3165 (DOI: 10.1038/ncomms4165) and in Muttenthaler et al., J. Med. Chem. 2010, 53, 8585-8596 (DOI: 10.1021/jm100989w).

[1761] In accordance with the present invention, a compstatin analogue of the invention may be synthesized or produced in a number of ways, including for example, a method which comprises:

[1762] (a) synthesizing the compstatin analogues by means of solid-phase or liquid-phase peptide synthesis methodology and recovering the synthesized compstatin analogues thus obtained; or

[1763] (b) expressing a precursor peptide sequence from a nucleic acid construct that encodes the precursor peptide, recovering the expression product, and modifying the precursor peptide to yield a compound of the invention.

[1764] The precursor peptide may be modified by introduction of one or more non-proteinogenic amino acids, e.g. Aib, Orn, Dap, 1-Me-Trp, 1-Nal, 2-Nal, Sar, γGlu or Dab, or by the introduction of an appropriate terminal groups Y1 and/or Y2.

[1765] Expression is typically performed from a nucleic acid encoding the precursor peptide, which may be performed in a cell or a cell-free expression system comprising such a nucleic acid.

[1766] It is preferred to synthesize the analogues of the invention by means of solid-phase or liquid-phase peptide synthesis. In this context, reference is made to WO 98/11125 and, among many others, Fields, G B et al., 2002, “Principles and practice of solid-phase peptide synthesis”. In: Synthetic Peptides (2nd Edition), and the Examples herein.

[1767] For recombinant expression, the nucleic acid fragments encoding the precursor peptide will normally be inserted in suitable vectors to form cloning or expression vectors. The vectors can, depending on purpose and type of application, be in the form of plasmids, phages, cosmids, mini-chromosomes, or virus, but also naked DNA which is only expressed transiently in certain cells is an important vector. Preferred cloning and expression vectors (plasmid vectors) are capable of autonomous replication, thereby enabling high copy-numbers for the purposes of high-level expression or high-level replication for subsequent cloning.

[1768] In general outline, an expression vector comprises the following features in the 5′-3′ direction and in operable linkage: a promoter for driving expression of the nucleic acid fragment, optionally a nucleic acid sequence encoding a leader peptide enabling secretion (to the extracellular phase or, where applicable, into the periplasma), the nucleic acid fragment encoding the precursor peptide, and optionally a nucleic acid sequence encoding a terminator. They may comprise additional features such as selectable markers and origins of replication. When operating with expression vectors in producer strains or cell lines it may be preferred that the vector is capable of integrating into the host cell genome. The skilled person is very familiar with suitable vectors and is able to design one according to their specific requirements.

[1769] The vectors of the invention are used to transform host cells to produce the precursor peptide. Such transformed cells can be cultured cells or cell lines used for propagation of the nucleic acid fragments and vectors, and/or used for recombinant production of the precursor peptides.

[1770] Preferred transformed cells are micro-organisms such as bacteria [such as the species Escherichia (e.g. E. coli), Bacillus (e.g. Bacillus subtilis), Salmonella, or Mycobacterium (preferably non-pathogenic, e.g. M. bovis BCG), yeasts (e.g., Saccharomyces cerevisiae and Pichia pastoris), and protozoans. Alternatively, the transformed cells may be derived from a multicellular organism, i.e. it may be fungal cell, an insect cell, an algal cell, a plant cell, or an animal cell such as a mammalian cell. For the purposes of cloning and/or optimised expression it is preferred that the transformed cell is capable of replicating the nucleic acid fragment of the invention. Cells expressing the nucleic fragment can be used for small-scale or large-scale preparation of the peptides of the invention.

[1771] When producing the precursor peptide by means of transformed cells, it is convenient, although far from essential, that the expression product is secreted into the culture medium.

[1772] Medical Conditions

[1773] In a broad aspect, the present invention provides compstatin analogues of the present invention for use as a medicament or for use in therapy.

[1774] The compstatin analogues described herein have biological activities of binding to C3 protein and/or inhibiting complement activation. Generally, the compstatin analogues of the present invention may be used for the treatment or prevention conditions associated with excessive or unwanted activation of the complement system. Complement can be activated through three different pathways: the classical, lectin and alternative pathways. The major activation event that is shared by all three pathways is the proteolytic cleavage of the central protein of the complement system, C3, into its activation products C3a and C3b by C3 convertases.

[1775] Generation of these fragments leads to the opsonization of pathogenic cells by C3b and iC3b, a process that renders them susceptible to phagocytosis or clearance, and to the activation of immune cells through an interaction with complement receptors (Markiewski & Lambris, 2007, Am. J. Pathol., 171: 715-727). Deposition of C3b on target cells also induces the formation of new convertase complexes and thereby initiates a self-amplification loop. An ensemble of plasma and cell surface-bound proteins carefully regulates complement activation to prevent host cells from self-attack by the complement cascade. The 13 amino acid cyclic tridecapeptide used as a reference point for the design of the compstatin analogues of the present invention inhibits complement activation by binding to C3 and/or C3b, preventing the cleavage of native C3 by the C3 convertases. Without wishing to be bound by any particular theory, the present inventors believe that the compstatin analogues of the present invention also function in this way and may share one or more biological activities selected from (1) binding to C3 protein, (2) binding to C3b protein, (3) inhibiting the cleavage of native C3 by C3 convertases, and/or (4) inhibiting the activation of the complement system. The biological activity of the compstatin analogues of the present invention may be determined in vitro by measuring their inhibitory effect of the classical complement pathway in a haemolysis assay, for example using a protocol set out in the examples below.

[1776] Excessive activation or inappropriate regulation of complement can lead to a number of pathologic conditions, ranging from autoimmune diseases to inflammatory diseases (Holers, 2003, Clin. Immunol., 107: 140-51; Markiewski & Lambris, 2007, supra; Ricklin & Lambris, 2007, Nat. Biotechnol., 25: 1265-75; Sahu et al., 2000, J. Immunol., 165: 2491-9). These conditions include: (1) inhibiting complement activation to facilitate treatment of diseases or conditions including age-related macular degeneration, Stargardt disease, periodontitis, diabetic retinopathy, glaucoma, uveitis, rheumatoid arthritis, spinal cord injury, stroke, multiple sclerosis, Parkinson's disease, Alzheimer's disease, cancer, and respiratory disorders such as asthma, chronic obstructive pulmonary disease (COPD), allergic inflammation, emphysema, bronchitis, bronchiecstasis, cystic fibrosis, tuberculosis, pneumonia, respiratory distress syndrome (RDS—neonatal and adult), rhinitis and sinusitis; bacterial infections such as sepsis, ischemia-reperfusion injury in various tissues, myocardial infarction, anaphylaxis, paroxysmal nocturnal hemoglobinuria, autoimmune hemolytic anemias, psoriasis, hidradentitis suppurativa, myasthenia gravis, systemic lupus erythematosus, CHAPLE syndrome, C3 glomeropathy, IgA nephropathy, atypical hemolytic uremic syndrome, Crohn's disease, ulcerative colitis, antiphospholipid syndrome, or (2) inhibiting complement activation that occurs during cell or solid organ transplantation, or in the use of artificial organs or implants (e.g., by coating or otherwise treating the cells, organs, artificial organs or implants with a peptide of the invention); or (3) inhibiting complement activation that occurs during extracorporeal shunting of physiological fluids (blood, urine) (e.g., by coating the tubing through which the fluids are shunted with a compstatin analogue of the present invention).

[1777] Pharmaceutical Compositions and Administration

[1778] In a further aspect, the present invention relates to a composition comprising a compstatin analogue according to the invention, or a pharmaceutically acceptable salt or solvate thereof, together with a carrier. In one embodiment of the invention, the composition is a pharmaceutical composition and the carrier is a pharmaceutically acceptable carrier. The present invention also relates to a pharmaceutical composition comprising a compstatin analogue according to the invention, or a salt and/or solvate thereof, together with a carrier, excipient or vehicle. Accordingly, the compstatin analogue of the present invention, or salts or solvates thereof, especially pharmaceutically acceptable salts and/or solvates thereof, may be formulated as compositions or pharmaceutical compositions prepared for storage or administration, and which comprise a therapeutically effective amount of a compstatin analogue of the present invention, or a salt or solvate thereof.

[1779] Suitable salts formed with bases include metal salts, such as alkali metal or alkaline earth metal salts.

[1780] In one embodiment, a pharmaceutical composition of the invention is one wherein the compstatin analogue is in the form of a pharmaceutically acceptable acid addition salt.

[1781] As will be apparent to one skilled in the medical art, a “therapeutically effective amount” of a compstatin analogue compound or pharmaceutical composition thereof of the present invention will vary depending upon, inter alia, the age, weight and/or gender of the subject (patient) to be treated. Other factors that may be of relevance include the physical characteristics of the specific patient under consideration, the patient's diet, the nature of any concurrent medication, the particular compound(s) employed, the particular mode of administration, the desired pharmacological effect(s) and the particular therapeutic indication.

[1782] Because these factors and their relationship in determining this amount are well known in the medical arts, the determination of therapeutically effective dosage levels, the amount necessary to achieve the desired result of treating and/or preventing and/or remedying malabsorption and/or low-grade inflammation described herein, as well as other medical indications disclosed herein, will be within the ambit of the skilled person.

[1783] As used herein, the term “a therapeutically effective amount” refers to an amount which reduces symptoms of a given condition or pathology, and preferably which normalizes physiological responses in an individual with that condition or pathology. Reduction of symptoms or normalization of physiological responses can be determined using methods routine in the art and may vary with a given condition or pathology. In one aspect, a therapeutically effective amount of one or more compstatin analogues, or pharmaceutical compositions thereof, is an amount which restores a measurable physiological parameter to substantially the same value (preferably to within 30%, more preferably to within 20%, and still more preferably to within 10% of the value) of the parameter in an individual without the condition or pathology in question.

[1784] In one embodiment of the invention, administration of a compound or pharmaceutical composition of the present invention is commenced at lower dosage levels, with dosage levels being increased until the desired effect of preventing/treating the relevant medical indication is achieved. This would define a therapeutically effective amount. For the compstatin analogues of the present invention, alone or as part of a pharmaceutical composition, such human doses of the active compstatin analogue may be between about 0.01 pmol/kg and 500 μmol/kg body weight, between about 0.01 pmol/kg and 300 μmol/kg body weight, between 0.01 pmol/kg and 100 μmol/kg body weight, between 0.1 pmol/kg and 50 μmol/kg body weight, between 1 pmol/kg and 10 μmol/kg body weight, between 5 pmol/kg and 5 μmol/kg body weight, between 10 pmol/kg and 1 μmol/kg body weight, between 50 pmol/kg and 0.1 μmol/kg body weight, between 100 pmol/kg and 0.01 μmol/kg body weight, between 0.001 μmol/kg and 0.5 μmol/kg body weight, between 0.05 μmol/kg and 0.1 μmol/kg body weight.

[1785] The therapeutic dosing and regimen most appropriate for patient treatment will of course vary with the disease or condition to be treated, and according to the patient's weight and other parameters. Without wishing to be bound by any particular theory, it is expected that doses, in the mg/kg range, and shorter or longer duration or frequency of treatment may produce therapeutically useful results, such as a statistically significant inhibition of the alternative and classical complement pathways. The dosage sizes and dosing regimen most appropriate for human use may be guided by the results obtained by the present invention, and may be confirmed in properly designed clinical trials.

[1786] An effective dosage and treatment protocol may be determined by conventional means, starting with a low dose in laboratory animals and then increasing the dosage while monitoring the effects, and systematically varying the dosage regimen as well. Numerous factors may be taken into consideration by a clinician when determining an optimal dosage for a given subject.

[1787] For local delivery to the eye, the pharmaceutically acceptable compositions may be formulated in isotonic, pH adjusted sterile saline or water, either with or without a preservative such as benzylalkonium chloride. Alternatively, for ophthalmic uses, the pharmaceutically acceptable compositions may be formulated in an ointment such as petrolatum or as eyedrops. Methods of local administration to the eye include, e.g., choroidal injection, transscleral injection or placing a scleral patch, selective arterial catheterization, eyedrops or eye ointments, intraocular administration including transretinal, subconjunctival bulbar, intravitreous injection, suprachoroidal injection, subtenon injection, scleral pocket and scleral cutdown injection, by osmotic pump, etc. The agent can also be alternatively administered intravascularly, such as intravenously (IV) or intraarterially. In choroidal injection and scleral patching, the clinician uses a local approach to the eye after initiation of appropriate anesthesia, including painkillers and ophthalmoplegics. A needle containing the therapeutic compound is directed into the subject's choroid or sclera and inserted under sterile conditions. When the needle is properly positioned the compound is injected into either or both of the choroid or sclera. When using either of these methods, the clinician can choose a sustained release or longer acting formulation. Thus, the procedure can be repeated only every several months or several years, depending on the subject's tolerance of the treatment and response.

[1788] The following examples are provided to describe the invention in greater detail. They are intended to illustrate, not to limit, the invention. The compounds described have particularly advantageous properties as a result of their particular amino acid sequences and/or acylation. In addition to compounds having residues linked by thioether bonds at the positions corresponding to positions 2 and 12 of compstatin, certain of the compounds described below have cysteine residues linked by disulfide bonds at those positions. It is believed that similar or otherwise identical compounds containing thioether linkages will have similar advantageous properties, and/or will show improvements in stability, such as chemical stability (resistance to degradation) or physical stability (resistance to aggregation).

### Example 1: Synthesis of Compstatin Analogues

[1789] General Peptide Synthesis

List of abbreviations and suppliers

| | Abbreviation | Name | Brand/Supplier |
|---|---|---|---|
| Resins | | TentaGel ™ PHB AA(Proct)- | Rapp Polymere |
| | | Fmoc | |
| | | TentaGel ™ SRAM | Rapp Polymere |
| | | Rink amide-MBHA | — |
| Amino | | Pseudoprolines (E.g. YS, FS, | Jupiter Bioscience Ltd. |
| acids | | FT) | |
| | | Fmoc-L-Aaa-OH | Senn Chemicals AG |
| Coupling | Oxyma Pure | Ethyl cyanoglyoxylate-2-oxime | Chem Impex international |
| reagents | DIC | Diisopropylcarbodiimide | Fluka/Sigma Aldrich Co. |
| | HATU | N-[(dimethylamino)-1H-1,2,3- | ChemPep Inc. |
| | | triazol[4,5-b]pyridine-1- | |
| | | ylmethylene]-N- | |
| | | methylmethanaminium | |
| | | hexafluorophosphate N-oxide | |
| | HOBt | Hydroxybenzotriazole | Sigma-Aldrich Co. |
| | HBTU | | — |
| | PyAOP | | |
| Solvents and | Boc₂O | Di-tert-butyl pyrocarbonate | Advanced ChemTech |
| reagents | DCM | Dichloromethane | Prolabo (VWR) |
| | DIPEA | Diisopropylethylamine | Fluka/Sigma Aldrich Co. |
| | NMM | | — |
| | DMF | N,N-dimethylformamide | Taminco |
| | Et₂O | Diethyl ether | Prolabo (VWR) |
| | EtOH | Ethanol | CCS Healthcare AB |
| | HCOOH | Formic acid (HPLC grade) | Sigma-Aldrich Co. |
| | H₂O | Water, Milli-Q water | Millipore |
| | MeCN | Acetonitrile (HPLC) | Sigma-Aldrich Co. |
| | NMP | N-methylpyrrolidone | Sigma-Aldrich Co. |
| | MeOH | Methanol | Sigma-Aldrich Co |
| | | Piperidine | Jubliant Life Sciences Ltd. |
| | TFA | Trifluoroacetic acid (HPLC) | Chemicals Raw Materials |
| | | | Ltd. |
| | TIS | Triisopropylsilane | Sigma-Aldrich Co. |
| | DODT | 2,2′-(ethylenedioxy)diethanethiol | Sigma-Aldrich Co. |
| Other | | Ascorbic acid | Sigma-Aldrich Co. |
| reagents | I₂ | Iodine | Sigma-Aldrich Co |
| | Pd[P(C₆H₅)₃]₄ | Tetrakis(triphenylphosphine) | Sigma-Aldrich Co. |
| | | palladium | |
| | N₂H₄ | Hydrazine | Sigma-Aldrich Co |

[1790] Apparatus and Synthetic Strategy

[1791] Peptides were synthesized batch wise manually or on a peptide synthesiser, such as a CEM Liberty Peptide Synthesizer or a Symphony X Synthesizer, according to solid phase peptide synthetic procedures using 9-fluorenylmethyloxycarbonyl (Fmoc) as N-α-amino protecting group and suitable common protection groups for side-chain functionalities.

[1792] Polymeric support based resins, such as e.g. TentaGel™, was used. The resin was swelled in DMF prior to initiation of the solid phase synthesis.

[1793] Standard Amino Acid Coupling Procedures

[1794] Manual Peptide Coupling

[1795] Manual coupling was performed with 2-3 equiv. of Fmoc-protected amino acid and either, HATU:NMM (2-3: 4-6 equiv), HBTU:NMM (2-3: 4-6 equiv), DIC:Oxyma (2-3: 2-3) or DIC:Oxyma:DIPEA (2-3: 2-3:0.3-6). Amino acid coupling times from 45 min to 1 hr while shaken followed by thorough washing.

[1796] CEM Liberty Peptide Synthesizer

[1797] A solution of Fmoc-protected amino acid (4 equiv.) coupling reagent (4 equiv.) and base (8 equiv.) was added to the resin. The mixture was either heated by the microwave unit to 70-75° C. for 5 min or coupled without heating for 60 min. During the coupling nitrogen was bubbled through the mixture.

[1798] Symphony X Synthesizer

[1799] The amino acid coupling reagents were transferred to the reaction vessels in the following order: Fmoc-protected amino acid (4 equiv.), HATU (4 equiv.) and DIPEA (8 equiv.). The coupling time was 10 min at room temperature (rt.) unless otherwise stated. The resin was washed with DMF (5×0.5 min). In case of repeated couplings the coupling time was in all cases 45 mins at rt.

[1800] Fmoc Deprotection

[1801] Manual Fmoc Deprotection

[1802] Following a thorough washing of the resin a solution of 20 v/v/% piperazine in DMF was added and the mixture has left reacting for 30 min while shaken. Following the coupling, the resin was washed appropriately.

[1803] CEM Liberty Peptide Synthesizer

[1804] The Fmoc group was deprotected using piperidine in DMF or other suitable solvents. The deprotection solution was added to the reaction vessel and the mixture was heated for 30 sec. reaching approx. 40° C.The reaction vessel was drained and fresh deprotection solution was added and subsequently heated to 70-75° C. for 3 min. After draining the reaction vessel the resin was washed with DMF or other suitable solvents.

[1805] Symphony X Synthesizer

[1806] Fmoc deprotection was performed for 2.5 min using 40% piperidine in DMF and repeated using the same conditions. The resin was washed with DMF (5×0.5 min).

[1807] Side Chain Acylation

[1808] Fmoc-Lys(Dde)-OH or amino acid with an alternative orthogonal side chain protective group was introduced at the position of the acylation (side-chain lipidation). The N-terminal of the linear peptide was either acetylated or Boc protected. While the peptide was still attached to the resin, the protecting group of the lysine ^{ε}—amine side chain was selectively cleaved using 10 freshly prepared hydrazine hydrate (2-4%) in NMP for 2×15 min. The unprotected lysine side-chain was then elongated using standard coupling conditions and Fmoc-deprotections with the desired building block according to the specific sequence. The lipid moiety was coupled as the last step.

[1809] Alternatively, the side chain acylation was assembled prior to assembly of the linear peptide. Dde-Lys(Fmoc)-OH or alternatively other orthogonal protection groups were introduced at the C-terminal at the position of the acylation (side-chain lipidation). The Fmoc group was then removed as described under the deprotection section and the unprotected lysine side-chain was elongated using standard amino acid coupling conditions and Fmoc-deprotections with the desired building block. The lipidation moiety was coupled as the last step. While the branched lysine was still attached to the resin, the orthogonal N-terminal protective group (Dde) was selectively cleaved using freshly prepared hydrazine hydrate (2-4%) in NMP for 2×15 min and the standard peptide synthesis continued.

[1810] Incorporation of the Dde-hCys(Fmoc-Ala-OAllyl)-OH (#1) or Dde-AIa(Fmoc-hCys-OAIIv)-OH (#2)

[1811] 1.5-3.0 equiv. of #1 or #2 (scheme 1a) was used and the building block was incorporated using standard coupling reagents and an extended coupling time of 2.5 hr to 12 hr.

[1812] Allyl Deprotection and Formation of the Lactam:

[1813] Following assembling of the branched peptide on-resin the OAII group was removed by treating the resin with a solution of Pd(P(C₆H₅)₃]₄ in CHCl₃/AcOH/NMM for 3 hours following a thorough wash with DMF. The Fmoc group was removed using standard deprotection conditions. The amide bond formed between the free amine and carboxylic acid was formed using PyAOP, HOBt and DIPEA (3:5:5) in DMF overnight.

[1814] Release of Peptide from the Solid Support

[1815] The dried peptide resin was treated with TFA and suitable scavengers for approximately 2 hr. The volume of the filtrate was reduced and the crude peptide was precipitated after addition of diethylether. The crude peptide precipitate was washed several times with diethylether and finally dried.

[1816] HPLC Purification of the Crude Peptide

[1817] The crude peptide was purified by preparative reverse phase HPLC using a conventional HPLC apparatus, such as a Gilson GX-281 with 331/332 pump combination, for binary gradient application equipped with a column, such as 5×25 cm Gemini NX 5u C18 110A column or a Phenomenex Luna C18 250 x21 mm 100 A, and a fraction collector using a flow 20-40 ml/min with a suitable gradient of buffer A (0.1% Formic acid, aq.) or A (0.1% TFA, aq.) and buffer B (0.1% Formic acid, 90% MeCN, aq.) or B (0.1% TFA, 90% MeCN, aq.). Fractions were analyzed by analytical HPLC and MS and selected fractions were pooled and lyophilized. The final product was characterized by HPLC and MS.

[1818] Formation of the Disulfide Bond

[1819] Following purification and lyophilisation of the crude linear peptide, the peptide was redissolved in 0.1% TFA in water, acetonitrile and acetic acid. The concentration of the peptide solution was kept at approx. 1-2 mg/ml. A solution of iodine in methanol (approx. 1.5 equiv.) was added drop-wise during stirring until the peptide solution obtained an orange colour. After 10-15 min, the reaction was completed and excess iodine was quenched with a solution of ascorbic acid in water (1 equiv.) until the peptide solution turned colourless. The peptide solution was diluted with water before purification on preparative HPLC.

[1820] Analytical HPLC

[1821] Final purities were determined by analytic HPLC (Agilent 1100/1200 series) equipped with auto sampler, degasser, 20 μl flow cell and Chromeleon software. The HPLC was operated with a flow of 1.2 ml/min at 40° C. using an analytical column, such as Kinetex 2.6 μm XB-C18 100A 100×8.6 mm column. The compound was detected and quantified at 215 nm. Buffers A (0.1% TFA, aq.) and buffer B (0.1% TFA, 90% MeCN, aq.).

[1822] Mass Spectroscopy

[1823] Final MS analysis were determined on a conventional mass spectroscopy, e.g. Waters Xevo G2 TOF, equipped with electrospray detector with lock-mass calibration and MassLynx software. It was operated in positive mode using direct injection and a cone voltage of 15V (1 TOF), 30 V (2 TOF) or 45 V (3 TOF) as specified on the chomatogram. Precision was 5 ppm with a typical resolution of 15,000-20,000.

[1824] Synthesis of Compound No 24:

[1825] Ac-IC(1)IWQDWGEHRC(1)TEGE-NH₂

[1826] Solid phase peptide synthesis was performed on a Symphony X Synthesizer using standard Fmoc chemistry. TentaGel S RAM (2.51 g; 0.23 mmol/g) was swelled in DMF (20 ml) and the Fmoc-group was deprotected according to the procedure described above.

[1827] Amino Acid Coupling

[1828] Suitable protected Fmoc-amino acids according to the sequence were coupled as described above using HATU as coupling reagent. All amino acid couplings were performed at rt.

[1829] Fmoc Deprotection

[1830] Fmoc deprotection was performed according to the procedure described above.

[1831] Cleavage of the Peptide from the Solid Support

[1832] The peptide-resin was washed with EtOH (3×10 ml) and Et2O (3×10 ml) and dried to constant weight at room temperature (rt). The peptide was released from the resin by treatment with TFA/DODT (95/5; 60 ml, 2 h; rt).The volume of the filtrate was reduced and the crude peptide was precipitated after addition of diethylether. The crude peptide precipitate was washed several times with diethylether and eventually dried to yield 760 mg crude peptide product (purity ˜30%).

[1833] HPLC Purification of the Crude Linear Peptide

[1834] The crude peptide was purified by preparative reverse phase HPLC using a Gilson GX-281with 331/332 pump combination for binary gradient application equipped with a 5×25 cm Gemini NX 5u C18 110A, column and a fraction collector and run at 35 ml/min with a gradient of buffer A (0.1% TFA, aq.) and buffer B (0.1% TFA, 90% MeCN, aq.) gradient from 20% B to 45% B in 47 min. Fractions were analyzed by analytical HPLC and MS and relevant fractions were pooled and lyophilized to yield 190 mg, with a purity of 85% as characterized by HPLC and MS as described above. Calculated monoisotopic MW 2001.58 m/z, Found 2001.81 m/z.

[1835] Formation of the Disulfide Bond

[1836] The 190 mg purified linear peptide was dissolved in 220 ml water/acetonitrile (65%/35%) with 0.1% TFA. A solution of iodine in methanol (2.2 mL, approx. 1.5 equiv. iodine) was added drop-wise during stirring until the peptide solution obtain an orange colour. The reaction was followed by analytic HPLC and the reaction were found to be complete after 10-15 min. Excess iodine was reduced with a solution of ascorbic acid in water (220 μL, approx. 1 equiv.) until the peptide solution turned colourless. The volume of the peptide solution was reduced slightly through rotary evaporation before purification on preparative HPLC.

[1837] HPLC Purification of the Oxidized Peptide

[1838] The crude peptide was purified by preparative reverse phase HPLC using a Gilson GX-281with 331/332 pump combination for binary gradient application equipped with a 5×25 cm Gemini NX 5u C18 110A, column and a fraction collector and run at 35 ml/min with a gradient of buffer A (0.1% TFA, aq.) and buffer B (0.1% TFA, 90% MeCN, aq.) gradient from 20% B to 45% B in 47 min. Fractions were analyzed by analytical HPLC and MS and relevant fractions were pooled and lyophilized to yield 138 mg, with a purity of 92% as characterized by HPLC and MS as described above. Calculated monoisotopic MW 1999.83 m/z, Found 1999.54 m/z.

[1839] Synthesis of Compound No 119

[1840] Ac-SEFC(1)1[1-Me-Trp]QDWGEHRC(1)[Sar]EGA-K([17-carboxy-heptadecanoyl][γGlu]G[Peg3][γGlu][Peg3])-NH₂ Solid phase peptide synthesis was performed on a Symphony X Synthesizer using standard Fmoc chemistry. TentaGel S RAM (3×-1.3 g; 0.22 mmol/g) was swelled in DMF (3×10 ml) prior to use and the Fmoc-group was deprotected according to the procedure described above.

[1841] Amino Acid Coupling

[1842] Suitable protected Fmoc-amino acids according to the sequence were coupled as described above using HATU as coupling reagent. All couplings were performed at rt. The lysine used for the incorporation of the branched moiety was incorporated as Fmoc-Lys(Dde)-OH for orthogonal coupling of the side chain.

[1843] Fmoc Deprotection

[1844] Fmoc deprotection was performed according to the procedure described above.

[1845] Side Chain Acylation

[1846] While the peptide was still attached to the resin, the orthogonal side-chain protective group (Dde) was selectively cleaved using freshly prepared hydrazine hydrate (4%) in NMP for 2×15 min. The unprotected lysine side-chain was doubled coupled with Fmoc-Peg3-OH followed by single couplings with Fmoc-Glu-OtBu, Fmoc-Peg3-OH, Fmoc-Gly-OH, Fmoc-Glu-OtBu and lastly the fatty acid moiety 17-carboxy-heptadecanoic acid mono tert-butyl ester using standard coupling conditions.

[1847] Cleavage of the Peptide from the Solid Support

[1848] The peptide-resin was washed with EtOH (3×15 ml) and Et2O (3×150 ml) and dried to constant weight at rt. The peptide was cleaved from the resin by treatment with TFA/DODT (95/5; 120 ml, 2 h; rt). The volume of the filtrate was reduced and the crude peptide was precipitated after addition of diethylether. The crude peptide precipitate was washed several times with diethylether and finally dried to yield 2.36 g crude peptide product (purity ˜41-48%).

[1849] HPLC Purification of the Crude Linear Peptide

[1850] The crude peptide was purified by preparative reverse phase HPLC using a Gilson GX-281 with 331/332 pump combination for binary gradient application equipped with a 5×25 cm Gemini NX 5u C18 110A, column and a fraction collector and run at 35 ml/min with a gradient of buffer A (0.1% TFA, aq.) and buffer B (0.1% TFA, 90% MeCN, aq.) gradient from 30% B to 60% B in 47 min. Fractions were analyzed by analytical HPLC and MS and relevant fractions were pooled and lyophilized to yield 744 mg, with a purity of 84% as characterized by HPLC and MS as described above. Calculated monoisotopic MW 3207.47 m/z, Found 3207.32 m/z.

[1851] Formation of the Disulfide Bond

[1852] The 744 mg purified linear peptide was dissolved in 350 ml 0.1% TFA in water, 150 ml acetonitrile and 100 ml acetic acid giving a clear solution. A solution of iodine in methanol (4.7 mL, approx. 1.5 equiv. iodine) was added drop-wise during stirring until the peptide solution obtained an orange colour. The reaction was followed by analytic HPLC. After 10-15 min, the reaction was completed and excess iodine was quenched with a solution of ascorbic acid in water (150 μL, approx. 1 equiv.) giving a colourless solution. The volume of the peptide solution was reduced slightly by rotary evaporation before purification on preparative HPLC.

[1853] HPLC Purification of the Oxidized Peptide

[1854] The crude peptide was purified by preparative reverse phase HPLC using a Gilson GX-281 with 331/332 pump combination for binary gradient application equipped with a 5×25 cm Gemini NX 5u C18 110A, column and a fraction collector and run at 35 ml/min with a gradient of buffer A (0.1% TFA, aq.) and buffer B (0.1% TFA, 90% MeCN, aq.) gradient from 30% B to 60% B in 47 min. Fractions were analysed by analytical HPLC and MS and relevant fractions were pooled and lyophilized to yield 510 mg, with a purity of 91% as characterized by HPLC and MS as described above. Calculated monoisotopic MW 3205.47 m/z, Found 3205.23 m/z.

[1855] Synthesis of Compound No 146

[1856] Ac-SEFA(1)l[1-Me-Trp]QDWGEHRhC(1)[Sar]EGE[Peg3][Peg3]-K([17-carboxy-heptadecanoyl][γGlu]G[γGlu])-NH2

[chemical structure]

[1857] An outline of the synthetic route for compound 146 (Scheme 1 b) is shown in FIG. 3.

[1858] General

[1859] Solid phase peptide synthesis was performed manual using standard Fmoc chemistry. Rink amide-MBHA (0.5 mmol, 0.214 mmol/g, ˜2.3 g) was swelled in DMF:DCM overnight prior to use and the Fmoc-group was deprotected according to the procedure described above.

[1860] Amino Acid Coupling

[1861] Suitable protected Fmoc-amino acids according to the sequence were coupled as described above using HBTU:NMM or HATU:NMM as coupling reagent using between 2-3 equiv. of amino acids. All couplings were performed at room temperature (rt.) for 1-3 hr unless otherwise mentioned. The lysine used for the incorporation of the branched moiety was incorporated as Dde-Lys(Fmoc)-OH for orthogonal coupling.

[1862] Fmoc Deprotection

[1863] Fmoc deprotection was performed according to the procedure described above.

[1864] Step 1 and 2 (Scheme 1b)

[1865] Following attachment of the Dde-Lys(Fmoc)-OH to the resin and Fmoc deprotection, the following amino acids were coupled to the lysine 8-amine: Fmoc-Glu-OtBu, Fmoc-Peg3-OH, 105 RECTIFIED SHEET (RULE 91) ISA/EP

[1866] Fmoc-Gly-OH, Fmoc-Glu-OtBu and lastly the fatty acid moiety 17-carboxy-heptadecanoic acid mono tert-butyl ester using HATU:NMM as coupling reagent. While the peptide was still attached to the resin, the protective group (Dde) was selectively cleaved using freshly prepared hydrazine hydrate (2-4%) in NMP for 2×15 min. Following a thorough wash with NMP the C-terminal amino acids were coupled using standard conditions (HATU:NMM in most cases) ending with coupling of the sarcosine.

[1867] Step 3 and 4 (Scheme 1b)

[1868] Following a standard Fmoc deprotection, the building block Dde-hCys(Fmoc-Ala-OAllyl)-OH (#1, scheme 1a) was incorporated using 3 equiv. of #1 and HATU:NMM (3:6) for 2.5 hr. rt. The N-terminal amino acids was coupled using 3 equiv. of amino acids and HBTU:NMM (3:6) for 1 hour at rt. ending with acetylation of the N-terminal using Ac₂O:DCM (1:2) for 2 hr.

[1869] Step 5 (Scheme 1b)

[1870] The synthesis was continued by removing the Dde protection group from the N-terminal amine using freshly prepared hydrazine hydrate (4%) in NMP for 2×15 min. Following a thorough wash with NMP the free amine and carboxylic acid were coupled forming a lactam using 3 equiv. of amino acids and HATU:NMM (3:6) for 1 hr at rt.

[1871] Step 6 (Scheme 1b)

[1872] Following assembling of the branched peptide on-resin the allyl group was removed by treating the resin with a solution of Pd(P(C₆H₅)₃]₄ in CHCl₃/AcOH/NMM for 3 hr. The resin was washed thoroughly and the Fmoc group was removed using standard deprotection conditions. The lactam was formed using PyAOP, HOBt and DIPEA (3:5:5) in DMF overnight.

[1873] Cleavage of the Peptide from the Solid Support (Step 7, Scheme 1b)

[1874] The peptide-resin was washed with EtOH (3×15 ml) and Et₂O (3×150 ml) and dried. The peptide was released from the resin by treatment with TFA/EDT/Thioanisole/Phenol/H₂O (87.5/2.5/5/2.5/2.5; 35 ml, 2 hr; rt.). The volume of the filtrate was reduced and the crude peptide was precipitated after addition of diethylether. The crude peptide precipitate was washed several times with diethylether and finally dried to yield 1.4 g crude peptide product (purity 23%).

[1875] HPLC Purification of the Final Peptide

[1876] The crude peptide was purified by preparative reverse phase HPLC equipped with a 5×25 cm Phenomenex Luna C18 110A, column and a fraction collector and run at 35 ml/min with a gradient of buffer A (0.1% TFA, aq.) and buffer B (0.1% TFA, 90% MeCN, aq.) gradient from 30% B to 60% B in 47 min. Fractions were analyzed by analytical HPLC and MS and relevant fractions were pooled and lyophilized to yield 125.5 mg, with a purity of 90.3% as characterized by HPLC and MS as described above. Calculated monoisotopic MW 3245.52 m/z, Found 3245.32 m/z.

TABLE 1a
Reference and disulfide-linked compounds:

| Compound | Sequence |
|---|---|
| Compstatin 1-13 | H-IC(1)VVQDWGHHRC(1)T-NH2 |
| Ac-cornpstatin | Ac-IC(1)VVQDWGHHRC(1)T-NH2 |
| 4W9A* | Ac-IC(1)VWQDWGAHRC(1)T-NH2 |
| Cp40* | H-{d}YIC(1)V[1-Me-Trp]QDW[Sar]AHRC(1)[N-Me-Ile]-NH2 |
| A | Ac-IC(1)VWQDWGEHRC(1)T-NH2 |
| B | Ac-IC(1)VWQDWGSHRC(1)T-NH2 |
| C | Ac-ESSAIC(1)VWQDWGEHRC(1)T-NH2 |
| D | Ac-IC(1)VWQDWGEHRC(1)TGAES-NH2 |
| E | Ac-IC(1)VWQDWGAHSC(1)T-NH2 |
| F | Ac-IC(1)VWQDWGEHSC(1)T-NH2 |
| G | Ac-IC(1)VWQDWGEHRC(1)S-NH2 |
| H | Ac-EGSAIC(1)VWQDWGEHRC(1)[Sar]E-NH2 |
| J | Ac-IC(1)VWQDWGEHRC(1)TEGE-NH2 |
| 1 | Ac-IC(1)IWQDWGAHRC(1)T-NH2 |
| 2 | Ac-IC(1)IWQDWGEHRC(1)T-NH2 |
| 3 | Ac-ESSAIC(1)IWQDWGEHRC(1)T-NH2 |
| 4 | Ac-IC(1)I[1-Me-Trp]QDWGEHRC(1)T-NH2 |
| 5 | Ac-IC(1)IWQDWGKHRC(1)T-NH2 |
| 6 | Ac-IC(1)IWQDWGSHRC(1)T-NH2 |
| 7 | Ac-IC(1)IWQKWGEHRC(1)T-NH2 |
| 8 | Ac-IC(1)IWQKWGAHRC(1)TGAES-NH2 |
| 9 | Ac-YC(1)IWQDWGEHRC(1)T-NH2 |
| 10 | Ac-ESSAYC(1)IWQDWGEHRC(1)T-NH2 |
| 11 | Ac-[Sar]C(1)IWQDWGEHRC(1)T-NH2 |
| 12 | Ac-IC(1)IWQDWGAHRC(1)E-NH2 |
| 13 | Ac-IC(1)IWQDWGEHRC(1)[Sar]-NH2 |
| 14 | Ac-ESSAIC(1)IWQDWGEHRC(1)TGAES-NH2 |
| 15 | Ac-IC(1)IWQDWGEHRC(1)TGAES-NH2 |
| 16 | Ac-IC(1)IWQEWGEHRC(1)T-NH2 |
| 17 | Ac-IC(1)IWQDWGDHRC(1)T-NH2 |
| 18 | Ac-IC(1)IWQDWGRHRC(1)T-NH2 |
| 19 | Ac-IC(1)IWQDWGAHSC(1)T-NH2 |
| 20 | Ac-IC(1)IWQDWGEHSC(1)T-NH2 |
| 21 | Ac-IC(1)IWQDWGEHRC(1)S-NH2 |
| 22 | Ac-IC(1)IWQDWGEHRC(1)E-NH2 |
| 23 | Ac-FC(1)IWQDWGEHRC(1)T-NH2 |
| 24 | Ac-IC(1)IWQDWGEHRC(1)TEGE-NH2 |
| 25 | Ac-IC(1)IWQDWGEHRC(1)TEA-NH2 |
| 26 | Ac-IC(1)IWQDWGEHRC(1)TE-NH2 |
| 27 | Ac-IC(1)IWQDWGEHRC(1)EGE-NH2 |
| 28 | Ac-EGSAIC(1)IWQDWGEHRC(1)[Sar]E-NH2 |
| 29 | Ac-EGSAIC(1)IWQDWGEHRC(1)T-NH2 |
| 30 | Ac-EGEIC(1)IWQDWGEHRC(1)T-NH2 |
| 31 | Ac-ESEIC(1)IWQDWGEHRC(1)T-NH2 |
| 32 | Ac-SEIC(1)IWQDWGEHRC(1)TEA-NH2 |
| 33 | Ac-EIC(1)IWQDWGEHRC(1)TE-NH2 |
| 34 | Ac-EIC(1)IWQDWGEHRC(1)TEGE-NH2 |
| 35 | Ac-EGEIC(1)IWQDWGEHRC(1)EGE-NH2 |
| 36 | Ac-ESEIC(1)IWQDWGEHRC(1)EGE-NH2 |
| 37 | Ac-KEKIC(1)IWQDWGEHRC(1)TEKE-NH2 |
| 38 | Ac-EKGIC(1)IWQDWGEHRC(1)TEKP-NH2 |
| 39 | Ac-IC(1)IWQDWGEHRC(1)TEGK-NH2 |
| 40 | Ac-GSAIC(1)IWQDWGEHRC(1)[Sar]E-NH2 |
| 41 | Ac-SAIC(1)IWQDWGEHRC(1)[Sar]E-NH2 |
| 42 | Ac-SAIC(1)IWQDWGEHRC(1)TEG-NH2 |
| 43 | Ac-FC(1)IWQDWGEHRC(1)TGAE-NH2 |
| 44 | Ac-EGSAIC(1)IWQDWGEHRC(1)[Sar]EGE-NH2 |
| 45 | Ac-EGSAFC(1)IWQDWGEHRC(1)[Sar]E-NH2 |
| 46 | Ac-ESSAIC(1)IWQDWGAHRC(1)T-NH2 |
| 47 | Ac-IC(1)IWQDWGAHRC(1)TGAES-NH2 |
| 48 | H-{d}Y1C(1)I[1-Me-Trp]QDW[Sar]AHRC(1)[N-Me-Ile]-NH2 |
| 49 | Ac-EGSAIC(1)I[1-Me-Trp]QDWGEHRC(1)[Sar]E-NH2 |
| 50 | Ac-EGSAIC(1)I[2-Nal]QDWGEHRC(1)[Sar]E-NH2 |
| 51 | Ac-IC(1)I[1-Me-Trp]QDWGEHRC(1)TGAES-NH2 |
| 52 | Ac-IC(1)I[2-Nal]QDWGEHRC(1)TGAES-NH2 |
| 53 | Ac-EGSAFC(1)I[1-Me-Trp]QDWGEHRC(1)[Sar]E-NH2 |
| 54 | Ac-EGSAYC(1)I[1-Me-Trp]QDWGEHRC(1)[Sar]E-NH2 |
| 55 | Ac-EGSAIC(1)IWQDWGEHRC(1)TE-NH2 |
| 56 | Ac-EGSAFC(1)I[1-Nal]QDWGEHRC(1)TE-NH2 |
| 57 | Ac-EGSAFC(1)I[1-Me-Trp]QDWGEHRC(1)TE-NH2 |
| 58 | Ac-EGSAFC(1)I[1-Me-Trp]QDWGEHRC(1)EGE-NH2 |
| 59 | Ac-EGSAYC(1)I[1-Me-Trp]QDWGEHRC(1)TE-NH2 |
| 60 | Ac-EGSAFC(1)I[2-Nal]QDWGEHRC(1)TE-NH2 |
| 61 | Ac-FC(1)I[1-Me-Trp]QDWGEHRC(1)TGAES-NH2 |
| 62 | Ac-YC(1)I[1-Me-Trp]QDWGEHRC(1)TGAES-NH2 |
| 63 | Ac-FC(1)I[1-Nal]QDWGEHRC(1)TGAES-NH2 |
| 64 | Ac-FC(1)I[2-Nal]QDWGEHRC(1)TGAES-NH2 |
| 65 | Ac-YC(1)I[2-Nal]QDWGEHRC(1)TGAES-NH2 |
| 66 | Ac-YC(1)IWQDWGEHRC(1)TGAES-NH2 |
| 67 | Ac-SEFC(1)I[1-Me-Trp]QDWGEHRC(1)TGAES-NH2 |
| 68 | Ac-YC(1)I[1-Me-Trp]QDWGEHRC(1)TEAGS-NH2 |
| 69 | Ac-YC(1)I[1-Me-Trp]QDWGEHRC(1)TESGA-NH2 |
| 70 | Ac-EGSAYC(1)I[1-Me-Trp]QEWGEHRC(1)[Sar]E-NH2 |
| 71 | Ac-SEYC(1)I[1-Me-Trp]QDWGEHRC(1)[Sar]EA-NH2 |
| 72 | Ac-FC(1)I[1-Me-Trp]QDW[Sar]EHRC(1)TGAES-NH2 |
| 73 | H-{d}YFC(1)I[1-Me-Trp]QDW[Sar]EHRC(1)TGAES-NH2 |
| 74 | Ac-SEFC(1)I[1-Me-Trp]QDWGEHRC(1)[Sar]GAES-NH2 |
| 75 | Ac-SEFC(1)I[1-Me-Trp]QDWGEHRC(1)[Sar]EA-NH2 |
| 76 | Ac-SEFC(1)I[1-Me-Trp]QDW[SarlEHRC(1)[Sar]EA-NH2 |
| 77 | Ac-SEFC(1)I[1-Me-Trp]QDW[Sar]EHRC(1)TEA-NH2 |
| 78 | Ac-SEFC(1)I[1-Me-TrpPDWGEHRC(1)[Sar]E-NH2 |
| 79 | Ac-SEFC(1)I[1-Me-Trp]QDW[Sar]EHRC(1)[Sar]E-NH2 |
| 80 | Ac-EFC(1)I[1-Me-Trp]QDWGEHRC(1)[Sar]EA-NH2 |
| 81 | Ac-SE[Sar]C(1)I[1-Me-Trp]QDWGEHRC(1)[Sar]EA-NH2 |
| 82 | Ac-SE[Sar]C(1)I[1-Me-Trp]QDWGEHRC(1)TEA-NH2 |
| 83 | Ac-SEFC(1)I[1-Me-Trp]QEWGEHRC(1)[Sar]EA-NH2 |
| 84 | Ac-SEFC(1)I[1-Me-Trp]QDWGEHRC(1)SEA-NH2 |
| 85 | Ac-EFC(1)I[1-Me-Trp]QDWGEHRC(1)ES-NH2 |
| 86 | Ac-SEFC(1)I[1-Me-Trp]QDWGEHKC(1)[Sar]EA-NH2 |
| 87 | Ac-GEFC(1)I[1-Me-Trp]QDWGEHRC(1)[Sar]EA-NH2 |
| 88 | Ac-GE[Sar]C(1)I[1-Me-Trp]QDWGEHRC(1)TEA-NH2 |
| 89 | Ac-SE[Sar]C(1)I[1-Me-Trp]QEW[Sar]EHRC(1)TEA-NH2 |
| 90 | Ac-SE[Sar]C(1)I[1-Me-Trp]QEWGEHRC(1)[Sar]EA-NH2 |
| 91 | H-{d}Y[Sar]C(1)I[1-Me-Trp]QDWGEHRC(1)TEA-NH2 |
| 92 | Ac-IC(1)IWQDWGEHRC(1)TEG-K([15-carboxy- |
| | pentadecanoyl][γGlu])-NH2 |
| 93 | Ac-IC(1)IWQDWGEHRC(1)TEG-K([15-carboxy- |
| | pentadecanoyl][γGlu][Peg3][Peg3])-NH2 |
| 94 | Ac-IC(1)IWQDWGEHRC(1)TEGE-K([15-carboxy- |
| | pentadecanoyl][γGlu][Peg3][Peg3])-NH2 |
| 95 | Ac-IC(1)IWQDWGEHRC(1)TEG-K((15-carboxy- |
| | pentadecanoyl)-[(Piperazine-1-yl)-acetyl][Peg3][Peg3])-NH2 |
| 96 | Ac-IC(1)IWQDWGEHRC(1)TEG-K([17-carboxy- |
| | heptadecanoyl][γGlu][Peg3][Peg3])-NH2 |
| 97 | Ac-1C(1)IWQDWGEHRC(1)TEGE-K([17-carboxy- |
| | heptadecanoyl][γGlu][Peg3][Peg3])-NH2 |
| 98 | Ac-IC(1)IWQDWGEHRC(1)TEG-K([19-carboxy- |
| | nonadecanoyl][γGlu][Peg3][Peg3])-NH2 |
| 99 | [15-Carboxy-pentadecanoyl]- |
| | ESSAIC(1)IWQDWGEHRC(1)TEGE-NH2 |
| 100 | Ac-[K([15-carboxy-pentadecanoyl][γGlu][Peg3]- |
| | [Peg3]GSAIC(1)IWQDWGEHRC(1)TEGE-NH2 |
| 101 | Ac-EGSAIC(1)IWQDWGEHRC(1)TEG-K([15-carboxy- |
| | pentadecanoyl][γGlu])-NH2 |
| 102 | Ac-FC(1)I[1-Me-Trp]QDWGEHRC(1)TGAES-K([15- |
| | carboxy-pentadecanoyl][γGlu][Peg3][Peg3])-NH2 |
| 103 | Ac-EGSAYC(1)I[1-Me-Trp]QDWGEH-[K([15-carboxy- |
| | pentadecanoyl][γGlu][Peg3][Peg3])]-C(1)[Sar]E-NH2 |
| 104 | Ac-EGSAYC(1)I[1-Me-Trp]QDWGEHRC(1)[Sar]EG-K([15- |
| | carboxy-pentadecanoyl][γGlu][Peg3][Peg3])-NH2 |
| 105 | Ac-SAYC(1)I[1-Me-Trp]QDWGEHRC(1)[Sar]E-K([17- |
| | carboxy-heptadecanoyl][γGlu]KG[γGlu])-NH2 |
| 106 | Ac-SAYC(1)I[1-Me-TrpPDWGEHRC(1)[Sar]EK([17- |
| | carboxy-heptadecanoyl][γGlu]G[γGlu])-NH2 |
| 107 | [15-Carboxy-pentadecanoyl]-EGSEYC(1)I[1-Me- |
| | Trp]QDWGEHRC(1)[Sar]E-NH2 |
| 108 | [17-Carboxy-heptadecanoyl]-EGSEYC(1)I[1-Me- |
| | Trp]QDWGEHRC(1)[Sar]E-NH2 |
| 109 | Ac-EGSAYC(1)I[1-Me-Trp]QDWGEHRC(1)[Sar]EGE-K([17- |
| | carboxy-heptadecanoyl][γGlu]G[γGlu])-NH2 |
| 110 | Ac-EGSAYC(1)I[1-Me-Trp]QDWGEHRC(1)[Sar]EGK-K([17- |
| | carboxy-heptadecanoyl][γGlu]G[γGlu])-NH2 |
| 111 | Ac-EGSAYC(1)I[1-Me-Trp]QDWGEHRC(1)[Sar]EK[γGlu]- |
| | K([17-carboxy-heptadecanoyl][γGlu][Peg3][Peg3])]-NH2 |
| 112 | Ac-SEYC(1)I[1-Me-Trp]QDWGEHRC(1)[Sar]EGA-K([17- |
| | carboxy-heptadecanoyl][γGlu]G[γGlu])-NH2 |
| 113 | Ac-ASGEYC(1)I[1-Me-Trp]QDWGEHRC(1)[Sar]EGE-K([17- |
| | carboxy-heptadecanoyl][γGlu]G[γGlu])-NH2 |
| 114 | Ac-SEYC(1)I[1-Me-Trp]QDWGEHRC(1)[Sar]EGE-K([17- |
| | carboxy-heptadecanoyl][γGlu]G[γGlu])-NH2 |
| 115 | Ac-SEYC(1)I[1-Me-Trp]QDWGEHRC(1)[Sar]EGK-K[17- |
| | carboxy-heptadecanoyl][γGlu]G[γGlu])]-NH2 |
| 116 | Ac-SEYC(1)I[1-Me-Trp]QDWGEHRC(1)[Sar]EGE-K([17- |
| | carboxy-heptadecanoyl][γGlu]K[γGlu])-NH2 |
| 117 | Ac-SEYC(1)I[1-Me- |
| | TrppDWGEHRC(1)[SalEGE[Peg3][Peg3]-K([17-carboxy- |
| | heptadecanoyl][γGlu]G[γGlu])-NH2 |
| 118 | Ac-SEYC(1)I[1-Me-Trp]QDWGEHRC(1)[Sar]EGA-K([17- |
| | carboxy-heptadecanoyl][γGlu]G[Peg3][γGlu][Peg3])-NH2 |
| 119 | Ac-SEFC(1)I[1-Me-Trp]QDWGEHRC(1)[Sar]EGA-K([17- |
| | carboxy-heptadecanoyl][γGlu]G[Peg3][γGlu][Peg3])-NH2 |
| 120 | Ac-SEFC(1)I[1-Me-Trp]QEWGEHRC(1)[Sar]EGA-K([17- |
| | carboxy-heptadecanoyl][γGlu]G[Peg3][γGlu][Peg3])-NH2 |
| 121 | Ac-SEYC(1)I[1-Me-Trp]QEW[Sar]EHRC(1)[Sar]K[γGlu]A- |
| | K([17-carboxy-heptadecanoyl][γGlu]G[Peg3][γGlu][Peg3])- |
| | NH2 |
| 122 | Ac-SEYC(1)I[1-Me-Trp]QEWGEHRC(1)[Sar]EGA-K([17- |
| | carboxy-heptadecanoyl][γGlu]G[Peg3][γGlu][Peg3])-NH2 |
| 123 | Ac-SEFC(1)I[1-Me-Trp]QDWGEHRC(1)[Sar]EGE- |
| | [Peg3][Peg3]-K([17-carboxy-heptadecanoyl][γGlu]G[γGlu])- |
| | NH2 |
| 124 | Ac-SEFC(1)I[1-Me-Trp]QEWGEHRC(1)[Sar]EGE- |
| | [Peg3][Peg3]-K([17-carboxy-heptadecanoyl][γGlu]- |
| | G[γGlu])]-NH2 |
| 125 | Ac-SEYC(1)I[1-Me- |
| | Trp]QEWGEHRC(1)[Sar]EGE[Peg3][Peg3]-K([17-carboxy- |
| | heptadecanoyI][γGlu]G[γGlu])-NH2 |
| 126 | Ac-SEFC(1)I[1-Me-Trp]QDWGEHRC(1)TEGE[Peg3][Peg3]- |
| | K([17-carboxy-heptadecanoyl][γGlu]G[γGlu])-NH2 |
| 127 | Ac-SEFC(1)I[1-Me-Trp]QDWGEHRC(1)- |
| | [Sar]EGE[Peg3][Peg3]-K([15-carboxy- |
| | pentadecanoyl][γGlu]-G[γGlu])-NH2 |
| 128 | Ac-SEFC(1)I[1-Me-Trp]QDWGEHRC(1)[Sar]EGE- |
| | [Peg3][Peg3]-K([19-carboxy-nonadecanoyl][γGlu]G[γGlu])- |
| | NH2 |
| 129 | Ac-SEFC(1)I[1-Me-TrppDWGEHRC(1)[Sar]EGEGGG- |
| | K([17-carboxy-heptadecanoyl][γGlu]G[γGlu])-NH2 |
| 130 | Ac-SEFC(1)I[1-Me-Trp]QDWGEHRC(1)TEGEGGG-K([17- |
| | carboxy-heptadecanoyl][γGlu]G[γGlu])-NH2 |
| 131 | Ac-SEFC(1)I[1-Me-Trp]QDWGEHRC(1)TEGEGGG-K([15- |
| | carboxy-pentadecanoyl][γGlu]G[γGlu])-NH2 |
| 132 | Ac-SEFC(1)I[1-Me-TrNQDWGEHRC(1)[Sar]EK[γGlu]GGG- |
| | K([17-carboxy-heptadecanoyl][γGlu]G[γGlu])-NH2 |
| 133 | Ac-SEFC(1)I[1-Me-TT]QDWGEHRC(1)TEK[γGlu]GGG- |
| | K([17-carboxy-heptadecanoyl][γGlu]G[γGlu])-NH2 |
| 134 | Ac-EFC(1)I[1-Me-Trp]QDWGEHRC(1)EGE-K([17-carboxy- |
| | heptadecanoyl][γGlu]G[γGlu])-NH2 |
| 135 | Ac-SEFC(1)I[1-Me-Trp]QDWGEHRC(1)TGAES-K([15- |
| | carboxy-hexadecanoyl][γGlu]G[γGlu])-NH2 |
| 136 | Ac-SEFC(1)I[1-Me-Trp]-QDWGEHRC(1)TEGE-[8- |
| | aminooctanoyl]-K([17-carboxy-heptadecanoyl]- |
| | [γGlu]G[γGlu])-NH2 |
| 137 | Ac-SEFC(1)I[1-Me-Trp]QDWGEHRC(1)TEGE-[8- |
| | aminooctanoyl]-E-K([17-carboxy-heptadecanoyl]- |
| | [γGlu]G[γGlu])-NH2 |
| 138 | Ac-SEFC(1)I[1-Me-Trp]QDWGEHRC(1)[Sar]EGE-[Peg3]- |
| | K([17-carboxy-heptadecanoyl][γGlu]G[γGlu])-NH2 |
| 139 | Ac-SEFC(1)I[1-Me-Trp]QDWGEHRC(1)[Sar]EGESES- |
| | K([17-carboxy-heptadecanoyl][γGlu]G[γGlu]p-NH2 |
| 140 | Ac-SEFC(1)I[1-Me-Trp]QDWGEHRC(1)[Sar]EGE[Peg3]ES- |
| | K([17-carboxy-heptadecanoyl][γGlu][γGlu])-NH2 |
| 141 | Ac-SEFC(1)I[1-Me-Trp]QDWGEHRC(1)[Sar]EGESES- |
| | K([17-carboxy-heptadecanoyl][γGlu])-NH2 |
| 142 | Ac-SEFC(1)I[1-Me-Trp]QDWGEHRC(1)TEGE[Peg3]ES- |
| | K([17-carboxy-heptadecanoyl][γGlu])-NH2 |
| 143 | Ac-SEFC(1)I[1-Me- |
| | Trp]QDWGEHR[C(1)[Sar]EGE[Peg3][Peg3][Peg3]-K([17- |
| | carboxy-heptadecanoyl][γGlu]G[γGlu])-NH2 |
| 144 | Ac-SEFC(1)I[1-Me- |
| | Trp]QDW[Sar]EHRC(1)[Sar]E[Peg3][Peg3]-K([17-carboxy- |
| | heptadecanoyl][γGlu]G[γGlu])-NH2 |
| 145 | Ac-EF[C(1)I[1-Me-Trp]QDWGEHRC(1)[Sar]EA- |
| | [Peg3][Peg3]-K([17-carboxy-heptadecanoyl][γGlu]G[γGlu])- |
| | NH2 |

*: 4W9A - described by Mallik et al., J. Med. Chem. 2005, 48, 274-286 (“V4W/H9A”).
Cp40 - decribed by Qu et al., Immunobiology 2013, 281(4): 496-505 (also referred to in that paper as “peptide 14).

TABLE 1b
Delta-cystathionine (Ctt2) compounds

| Compound | Sequence |
|---|---|
| 146 | Ac-SEFA(1)I[1-Me-Trp]QDWGEHRhC(1)[Sar]EGE[Peg3][Peg3]-K([17- |
| | carboxy-heptadecanoyl][γGlu]G[γGlu])-NH2 |
| 147 | Ac-SEFA(1)I[1-Me-Trp]QDW[Sar]EHRhC(1)[Sar]E[Peg3][Peg3]-K([17- |
| | carboxy-heptadecanoyl][γGlu]G[γGlu])-NH2 |
| 148 | Ac-SEFA(1)I[1-Me-Trp]QDWGEHRhC(1)TEGE[Peg3]ES-K([17- |
| | carboxy-heptadecanoyl][γGlu])-NH2 |
| 149 | Ac-GEFA(1)I[1-Me-Trp]QDW[Sar]EHRhC(1)[Sar]EAE[Peg3][Peg3]- |
| | K([17-carboxy-heptadecanoyl][γGlu]G[γGlu])-NH2 |
| 150 | Ac-SEFA(1)I[1-Me-Trp]QDW[Sar]EHRhC(1)[Sar]EGE[Peg3]ES-K([17- |
| | carboxy-heptadecanoyl][γGlu]G[γGlu])-NH2 |
| 151 | Ac-SEFA(1)I[1-Me-Trp]QDWGEHRhC(1)TGAES-NH2 |
| 153 | Ac-SEFA(1)]I[1-Me-Trp]QEWGEHRhC(1)[Sar]EGE[Peg3][Peg3]-K([17- |
| | carboxy-heptadecanoyl][γGlu]G[γGlu])-NH2 |
| 154 | Ac-SEFA(1)I[1-Me-Trp]QDWGEHRhC(1)[Sar]EGA-K([17-carboxy- |
| | heptadecanoyl][γGlu]G[Peg3][γGlu][Peg3])-NH2 |
| 155 | Ac-GEFA(1)I[1-Me-Trp]QEWGEHRhC(1)[Sar]EGE[Peg3]ES-K([17- |
| | carboxy-heptadecanoyl][γGlu]G[γGlu])-NH2 |
| 156 | Ac-SEFA(1)I[1-Me-Trp]QDWGEHRhC(1)TEGE[Peg3][Peg3]-K([17- |
| | carboxy-heptadecanoyl][γGlu]G[γGlu])-NH2 |
| 157 | Ac-SEFA(1)I[1-Me-Trp]QDWGEHRhC(1)TEGEGGG-K([17-carboxy- |
| | heptadecanoyl][γGlu]G[γGlu])-NH2 |
| 158 | Ac-EFA(1)I[1-Me-Trp]QEWGEHRhC(1)[Sar]EA[Peg3][Peg3]-K([17- |
| | carboxy-heptadecanoyl][γGlu]G[γGlu])-NH2 |
| 159 | Ac-EGSAYA(1)I[1-Me-Trp]QDWGEHRhC(1)[Sar]EK[γGlu]-K([17- |
| | carboxy-heptadecanoyl][γGlu][Peg3][Peg3])-NH2 |
| 160 | Ac-SEFA(1)I[1-Me-Trp]QDWGEHRhC(1)[Sar]EGE[Peg3][Peg3]-K([15- |
| | carboxy-pentadecanoyl][γGlu]G[γGlu])-NH2 |
| 161 | Ac-EFA(1)I[1-Me-Trp]QDWGEHRhC(1)EGE-K([17-carboxy- |
| | heptadecanoyl][γGlu]G[γGlu])-NH2 |
| 162 | Ac-SEFA(1)I[1-Me-Trp]QDW[Sar]EHRhC(1)[Sar]E[Peg3][Peg3]-K([17- |
| | carboxy-heptadecanoyl][γGlu]G[γGlu])-OH |
| 163 | Ac-SEFA(1)I[1-Me-Trp]QDWGEHRhC(1)TEGE[Peg3]ES-K([17- |
| | carboxy-heptadecanoyl][γGlu])-OH |

TABLE 1c
Gamma-cystathionine (Ctt1) compounds

| Compound | Sequence |
|---|---|
| 152 | Ac-SEFhC(1)I[1-Me-Trp]QDWGEHRA(1)[Sar]EGE[Peg3][Peg3]-K([17- |
| | carboxy-heptadecanoyl][γGlu]G[γGlu]-NH2 |
| 164 | Ac-SEFhC(1)I[1-Me-Trpp]QDW[Sar]EHRA(1)[Sar]E[Peg3][Peg3]-K([17- |
| | carboxy-heptadecanoyl][γGlu]G[γGlu])-NH2 |
| 165 | Ac-SEFhC(1)I[1-Me-Trp]QDWGEHRA(1)TEGE[Peg3]ES-K([17- |
| | carboxy-heptadecanoyl][γGlu])-NH2 |
| 166 | Ac-SEFhC(1)I[1-Me-Trp]QDW[Sar]EHRA(1)[Sar]EGE[Peg3]ES-K([17- |
| | carboxy-heptadecanoyl][γGlu]G[γGlu])-NH2 |
| 167 | Ac-SEFhC(1)I[1-Me-Trp]QEWGEHRA(1)[Sar]EGE[Peg3][Peg3]-K([17- |
| | carboxy-heptadecanoyl][γGlu]G[γGlu]-NH2 |

### Example 2: In Vitro Haemolysis Assay

[1877] Method The in vitro effect of test compounds was assessed by measuring their inhibitory effect of the classical complement pathway in a haemolysis assay.

[1878] Briefly, test compounds and reference compounds were dissolved in DMSO and diluted in Tris/Casein Assay Buffer (10 mM Tris, 145 mM NaCl, 0.5 mM MgCl₂, 0.15 mM CaCl₂, and 0.1% W/V Casein, adjusted to pH 7.4) as 9-point serial dilutions in a 96 well plate. Sensitized sheep red blood cells (RBC) coated with rabbit anti-sheep erythrocyte antiserum (Complement Technology, Inc., TX, USA) were washed in Tris/Casein Assay Buffer. 50 μL from each well of diluted compound was added to a 96-well plate containing 50 μL diluted human serum (Complement Technology, Inc., TX, USA) and incubated for 15 minutes at room temperature. The serum dilution factor was optimized for every serum batch to obtain 70-90% of maximal haemolysis using the protocol. Then 50 μL sensitized sheep red blood cells were added to all wells (107 per well).

[1879] After 30 minutes of incubation at 37° C. with gentle agitation, the reaction was stopped by addition of 50 μL Tris STOP Buffer per well (10 mM EDTA, 10 mM Tris, 145 mM NaCl adjusted to pH 7.4). The RBCs were then removed by centrifugation and the resulting supernatant measured for hemolysis by absorbance at 405 nm.

[1880] The response was normalized relative to a positive and negative control (vehicle) to calculate the IC50 from the concentration response curve using the 4-parameter logistic (4PL) nonlinear model for curve fitting. All values are based on n=>2 independent determinations.

TABLE 2
Effect of exchange from valine to isoleucine. Compound 1 differs from the prior
art compound 4W9A only by the presence of Ile instead of Val at position 3.

| | CP | | | | | | | | | | | | | | | |
|---|---|---|---|---|---|---|---|---|---|---|---|---|---|---|---|---|
| Comp | hemolysis | | | | | | | | | | | | | | | |
| no | IC50 (nM) | | 1 | 2 | 3 | 4 | 5 | 6 | 7 | 8 | 9 | 10 | 11 | 12 | 13 | |
| 1 | 150 | Ac | I | C(1) | I | W | Q | D | W | G | A | H | R | C(1) | T | NH₂ |
| 4W9A | 250 | | | | V | | | | | | | | | | | |

[1881] Further compounds were tested as shown below.

TABLE 3
in vitro analysis of inhibition of hemolysis

| Compound | IC50[nM] |
|---|---|
| Compstatin | >5 μM |
| Ac-compstatin | >5 μM |
| 4W9A | <500 |
| Cp40 | <100 |
| 1 | <250 |
| 2 | <100 |
| 3 | <100 |
| 4 | <100 |
| 5 | <250 |
| 6 | <250 |
| 7 | <1000 |
| 8 | <500 |
| 9 | <100 |
| 10 | <100 |
| 11 | <100 |
| 12 | <100 |
| 13 | <100 |
| 14 | <100 |
| 15 | <100 |
| 16 | <100 |
| 17 | <100 |
| 18 | <100 |
| 19 | <250 |
| 20 | <100 |
| 21 | <100 |
| 22 | <100 |
| 23 | <100 |
| 24 | <100 |
| 25 | <100 |
| 26 | <100 |
| 27 | <100 |
| 28 | <100 |
| 29 | <100 |
| 30 | <100 |
| 31 | <100 |
| 32 | <100 |
| 33 | <100 |
| 34 | <250 |
| 35 | <500 |
| 36 | <250 |
| 37 | <250 |
| 38 | <250 |
| 39 | <100 |
| 40 | <250 |
| 41 | <250 |
| 42 | <250 |
| 43 | <100 |
| 44 | <250 |
| 45 | <100 |
| 46 | <100 |
| 47 | <100 |
| 48 | <100 |
| 49 | <100 |
| 50 | <100 |
| 51 | <100 |
| 52 | <100 |
| 53 | <100 |
| 54 | <100 |
| 55 | <250 |
| 56 | <100 |
| 57 | <100 |
| 58 | <100 |
| 59 | <100 |
| 60 | <100 |
| 61 | <100 |
| 62 | <100 |
| 63 | <100 |
| 64 | <100 |
| 65 | <100 |
| 66 | <100 |
| 67 | <100 |
| 68 | <100 |
| 69 | <100 |
| 70 | <100 |
| 71 | <100 |
| 72 | <100 |
| 73 | <100 |
| 74 | <100 |
| 75 | <100 |
| 76 | <100 |
| 77 | <100 |
| 78 | <100 |
| 79 | <100 |
| 80 | <100 |
| 81 | <100 |
| 82 | <100 |
| 83 | <100 |
| 84 | <100 |
| 85 | <100 |
| 86 | <100 |
| 87 | <100 |
| 88 | <100 |
| 89 | <100 |
| 90 | <250 |
| 91 | <100 |
| 92 | <1000 |
| 93 | <500 |
| 94 | <500 |
| 95 | <500 |
| 96 | <1000 |
| 97 | <250 |
| 98 | <500 |
| 99 | <250 |
| 100 | <500 |
| 101 | <500 |
| 102 | <100 |
| 103 | <100 |
| 104 | <100 |
| 105 | <100 |
| 106 | <250 |
| 107 | <100 |
| 108 | <500 |
| 109 | <250 |
| 110 | <250 |
| 111 | <100 |
| 112 | <500 |
| 113 | <500 |
| 114 | <500 |
| 115 | <250 |
| 116 | <500 |
| 117 | <250 |
| 118 | <100 |
| 119 | <100 |
| 120 | <250 |
| 121 | <250 |
| 122 | <500 |
| 123 | <100 |
| 124 | <100 |
| 125 | <500 |
| 126 | <100 |
| 127 | <100 |
| 128 | <100 |
| 129 | <100 |
| 130 | <100 |
| 131 | <100 |
| 132 | <100 |
| 133 | <100 |
| 134 | <100 |
| 135 | <100 |
| 136 | <100 |
| 137 | <100 |
| 138 | <100 |
| 139 | <100 |
| 140 | <100 |
| 141 | <100 |
| 142 | <100 |
| 143 | <100 |
| 144 | <100 |
| 145 | <100 |
| 146 | <100 |
| 147 | <100 |
| 148 | <100 |
| 149 | <100 |
| 150 | <100 |
| 151 | <100 |
| 152 | <100 |
| 153 | <100 |
| 154 | <100 |
| 155 | <100 |
| 156 | <100 |
| 157 | <100 |
| 158 | <250 |
| 159 | <100 |
| 160 | <100 |
| 161 | <100 |
| 162 | <100 |
| 163 | <100 |
| 164 | <100 |
| 165 | <250 |
| 166 | <100 |
| 167 | <500 |

[1882] The following pairs of compounds, each of which differ only at position 3, show that the effects of replacing valine by isoleucine are seen in compounds having a variety of peptide backbone sequences.

TABLE 4
Direct comparison of valine 3 to isoleucine 3 in combination with modification at position 9, 11 and/or 13.

| | CP | | | | | | | | | | | | | | | | | |
|---|---|---|---|---|---|---|---|---|---|---|---|---|---|---|---|---|---|---|
| | hemolysis | | | | | | | | | | | | | | | | | |
| Compound | IC50 (nM) | | | 1 | 2 | 3 | 4 | 5 | 6 | 7 | 8 | 9 | 10 | 11 | 12 | 13 | | |
| 2 | 94 | Ac | | I | C(1) | I | W | Q | D | W | G | E | H | R | C(1) | T | | NH₂ |
| A | 350 | | | | | V | | | | | | | | | | | | |
| 6 | 140 | Ac | | I | C(1) | I | W | Q | D | W | G | S | H | R | C(1) | T | | NH₂ |
| B | 360 | | | | | V | | | | | | | | | | | | |
| 3 | 69 | Ac | ESSA | I | C(1) | I | W | Q | D | W | G | E | H | R | C(1) | T | | NH₂ |
| C | 300 | | | | | V | | | | | | | | | | | | |
| 15 | 47 | Ac | | I | C(1) | I | W | Q | D | W | G | E | H | R | C(1) | T | GAES | NH₂ |
| D | 210 | | | | | V | | | | | | | | | | | | |
| 19 | 140 | Ac | | I | C(1) | I | W | Q | D | W | G | A | H | S | C(1) | T | | NH₂ |
| E | >1000 | | | | | V | | | | | | | | | | | | |
| 20 | 59 | Ac | | I | C(1) | I | W | Q | D | W | G | E | H | S | C(1) | T | | NH₂ |
| F | 540 | | | | | V | | | | | | | | | | | | |
| 21 | 77 | Ac | | I | C(1) | I | W | Q | D | W | G | E | H | R | C(1) | S | | NH₂ |
| G | 180 | | | | | V | | | | | | | | | | | | |
| 28 | 88 | Ac | EGSA | I | C(1) | I | W | Q | D | W | G | E | H | R | C(1) | Sar | E | NH₂ |
| H | 330 | | | | | V | | | | | | | | | | | | |
| 24 | 90 | Ac | | I | C(1) | I | W | Q | D | W | G | E | H | R | C(1) | T | EGE | NH₂ |
| J | 240 | | | | | V | | | | | | | | | | | | |

[1883] Isoleucine at position 3 was also demonstrated to be superior compared to other residues often considered to be “conservative” replacements for isoleucine.

TABLE 5
Effect on hemolysis of different residues at position 3
Ac-IC(1)XWQDWGEHRC(1)T-NH2

| Compound | Position 3 (X) | IC50, CP hemolysis (nM) |
|---|---|---|
| A | Valine | 350 |
| 2 | Isoleucine | <100 |
| — | Leucine | 500 |
| — | Norvaline | >1000 |
| — | Norleucine | 480 |
| — | Phenylalanine | >10000 |
| — | Beta-Homo-Isoleucine | >10000 |

[1884] Due to the high concentration of C3 found in serum, it may be difficult to use the hemolysis assay to differentiate between compounds having very high affinity for C3.

[1885] In such circumstances, it may be possible to determine a more accurate hierarchy of binding affinity to C3 by SPR measurements using immobilized C3, as described below.

### Example 3: Solubility Test

[1886] Materials and Method

[1887] Compound solubility at 10 mg/mL

[1888] The solubility of compounds was assessed by measuring light scattering over a pH interval from pH 4 to pH 7.5.

[1889] Compounds were dissolved in a stock solution of 20 mg/mL in H₂O at pH 2.5 or pH 10.

[1890] These stock solutions were diluted 1:1 with 200 mM buffered solution to reach a final solution of 10 mg/mL compound in 100 mM buffer. The 5 investigated conditions were (1) acetate pH 4.0, (2) acetate pH 5.0, (3) phosphate pH 6.0, (4) phosphate pH 7 and (5) phosphate pH 7.5.

[1891] These samples were equilibrated for 15 minutes at ambient temperature, before evaluating solubility by visual inspection and absorbance measurements in a SpectraMax 190 microplate reader (Molecular Devices).

[1892] Visual Inspection

[1893] Visual inspection included manually checking the 96 well plate for wells that are clear or non-clear. In addition to this a picture of the 96 well plate is taken.

[1894] Microplate Reader and Light Scattering

[1895] Absorbance was measured at four wavelengths: 280 nm, 325 nm, 340 nm and 360 nm in an UV transparent 96 well microplate in a SpectraMax 190 microplate reader (Molecular Devices). The compounds do not absorb at 325-360 nm and signal at these wavelengths are therefore an expression of light scattering, which reflects the presence of visible or sub-visible particles that are detected as increased signal.

[1896] The light scattering was normalized to the signal from pure buffer solutions (100 mM) and compound solubility was evaluated as good (+) or poor (−). The criteria for this was a combination of visual inspection and light scattering not exceeding 0.1 AU, where values below 0.1 AU are good in visually clear samples.

[1897] Solubility of Comp No 24:

[1898] Stock Solution

[1899] Comp No 24 was carefully weighed out and dissolved in pH 2.5H₂O—Cl. The stock solution was equilibrated 15 minutes at ambient temperature, at which point no visible particles were present. 200 mM buffer stock solutions were prepared for each pH condition.

[1900] Solubility Assay:

[1901] The formulations for solubility testing were made by mixing 50 μL Comp No 24 stock solution and 50 μL buffer stock solution with gentle mixing by pipetting the solution a couple of times. This was done for each buffer/pH condition in a UV transparent 96 well microplate (Corning 96 well REF 3635). Reference samples without Comp No 24 were made by mixing 50 μL pH 2.5H₂O—Cl and 50 μL buffer stock solution. The plate was covered with a lid and left 15 minutes at ambient temperature before assessing solubility.

[1902] Measuring Solubility:

[1903] Solubility was assessed by visual inspection of each formulation and a picture taken in a photo box. Light scattering was measured at 280 nm, 325 nm, 340 nm and 360 nm in a SpectraMax 190 microplate reader (Molecular Devices).

[1904] The visual inspection revealed that condition 1, 2 and 3 were cloudy and condition 2 additionally contained visible precipitates. The absorbance measurement confirmed the visual evaluation with condition 1, 2 and 3 all exceeding 0.1 AU threshold. Condition 4 and 5 were thus deemed good conditions for solubility of 10 mg/mL Comp No 24.

[1905] Similarly, additional compounds were tested for solubility (Table 6).

TABLE 6
Table of most soluble compounds, as tested at 10 mg/mL.

| | Buffer & pH | | | | |
|---|---|---|---|---|---|
| | Condition 1 | Condition 2 | Condition 3 | Condition 4 | Condition 5 |
| Comp | Acetate | Acetate | Phosphate | Phosphate | Phosphate |
| No | pH 4 | pH 5 | pH 6 | pH 7 | pH 7.5 |
| 1 | + | − | − | − | − |
| 3 | + | − | − | + | + |
| 14 | + | − | − | + | + |
| 15 | + | − | − | + | + |
| 22 | + | − | − | + | + |
| 24 | − | − | − | + | + |
| 25 | + | − | − | + | + |
| 27 | − | − | − | + | + |
| 28 | + | + | + | + | + |
| 30 | − | − | − | + | + |
| 31 | + | + | + | + | + |
| 32 | − | − | − | + | + |
| 33 | − | − | + | + | + |
| 36 | − | − | − | + | + |
| 40 | − | − | + | + | + |
| 41 | − | − | + | + | + |
| 44 | − | − | + | + | + |
| 45 | − | + | + | + | + |
| 49 | − | − | + | + | + |
| 50 | − | − | + | + | + |
| 51 | − | − | + | + | + |
| 52 | − | − | + | + | + |
| 53 | − | − | + | + | + |
| 54 | − | − | + | + | + |
| 55 | − | − | + | + | + |
| 56 | − | − | + | + | + |
| 57 | − | − | + | + | + |
| 60 | − | − | + | + | + |
| 61 | − | − | + | + | + |
| 62 | − | − | + | + | + |
| 63 | − | − | + | + | + |
| 65 | − | − | + | + | + |
| 66 | − | − | + | + | + |
| 67 | − | − | + | + | + |
| 68 | − | − | + | + | + |
| 72 | − | − | + | + | + |
| 73 | + | − | − | + | + |
| 74 | − | + | + | + | + |
| 76 | − | − | + | + | + |
| 77 | − | − | + | + | + |
| 78 | − | − | + | + | + |
| 79 | − | − | + | + | + |
| 80 | − | − | + | + | + |
| 81 | − | − | + | + | + |
| 102 | − | + | + | + | + |
| 103 | − | + | + | + | + |
| 104 | − | + | + | + | + |
| 105 | − | − | + | + | + |
| 107 | − | − | + | + | + |
| 108 | − | − | + | + | + |
| 109 | − | + | + | + | + |
| 111 | − | − | + | + | + |
| 114 | + | + | + | + | + |
| 115 | − | − | + | + | + |
| 116 | − | − | + | + | + |
| 118 | − | + | + | + | + |

“+” denotes solubility at the given condition, as determined by UV absorbance being less than 0.1 AU at 340 nm and the sample being clear when manually inspected.
“−” denotes lack of solubility at the given condition, as UV absorbance at 340 nm exceeds 0.1 AU and/or it is visibly turbid or contains particles.

### Example 4: Affinity Measurements by Surface Plasmon Resonance (SPR)

[1906] Method

[1907] Surface plasmon resonance (SPR) was used to characterize peptides with respect to their binding affinity (Kd) for C3. Human C3 (Complement tech cat #A1 13c) was immobilised on individual flow cells of CM5 sensor chips (GE Healthcare) using standard amine coupling to a density of approximately 3000 resonance units (RU) in a buffer consisting of 10 mM phosphate pH 7.4, 150 mM NaCl, 0.05% Tween20.

[1908] For interaction experiments a multi-cycle experiment approach was used and performed using either a Biacore™ T200 or Biacore™ X100 instrument (GE Healthcare) at 25° C. Peptides were injected in increasing concentration series (5-8 different concentrations) for 60-120 s at a flow rate of 30 μL/min in a buffer consisting of 10 mM Tris buffer at pH 7.4, with 150 mM NaCl and 0.05% Tween20. This was followed by a dissociation period for up to 10 min. The C3 surface was regenerated between runs by a 45 s injection of 3 M MgCl₂.

[1909] Sensorgrams were double-referenced (reference surface, blanks) prior to analysis of the kinetic profiles by globally fitting data to a 1:1 Langmuir binding model to obtain association and dissociation rates for calculation of the equilibrium dissociation constant Kd. Each peptide was tested at in at least 2 independent experiments.

TABLE 7
Compstatin analogues binding affinities for C3 as determined
by a surface plasmon resonance assay with immobilized C3.

| Comp. no. | Kd [nM] | N |
|---|---|---|
| 2 | 16 | 3 |
| 4 | 1.5 | 3 |
| 15 | 14 | 3 |
| 20 | 37 | 3 |
| 21 | 16 | 3 |
| 23 | 2.8 | 3 |
| 24 | 28 | 5 |
| 28 | 44 | 3 |
| 29 | 21 | 3 |
| 43 | 3.3 | 3 |
| 48 | 0.12 | 3 |
| 49 | 3.2 | 3 |
| 50 | 13 | 3 |
| 53 | 1.4 | 3 |
| 54 | 3.0 | 3 |
| 61 | 0.33 | 3 |
| 63 | 4.3 | 3 |
| 67 | 0.68 | 7 |
| 73 | 0.30 | 3 |
| 75 | 1.5 | 3 |
| 81 | 9.7 | 3 |
| 82 | 5.4 | 3 |
| 85 | 1.3 | 3 |
| 86 | 2.6 | 3 |
| 102 | 1.7 | 3 |
| 104 | 34 | 2 |
| 106 | 5.4 | 5 |
| 107 | 6.1 | 5 |
| 111 | 8.2 | 5 |
| 117 | 24 | 3 |
| 118 | 11 | 5 |
| 119 | 9.8 | 3 |
| 120 | 28 | 3 |
| 121 | 30 | 3 |
| 122 | 63 | 3 |
| 123 | 11 | 3 |
| 124 | 31 | 3 |
| 125 | 71 | 3 |
| 126 | 5.2 | 3 |
| 127 | 8.5 | 3 |
| 128 | 6.5 | 3 |
| 130 | 4.4 | 3 |
| 139 | 7.4 | 3 |
| 140 | 7.6 | 3 |
| 141 | 6.6 | 3 |
| 142 | 4.8 | 3 |
| 144 | 1.5 | 2 |
| 146 | 0.43 | 2 |
| 147 | 0.71 | 2 |
| 148 | 3.4 | 2 |
| 149 | 0.50 | 2 |
| 150 | 0.56 | 2 |
| 151 | 1.4 | 2 |
| 152 | 16 | 2 |
| 153 | 11.1 | 2 |
| 154 | 2.4 | 2 |
| 157 | 3.5 | 2 |
| 161 | 3.4 | 2 |
| 164 | 6.4 | 2 |
| 165 | 20.7 | 2 |
| 166 | 6.5 | 2 |
| 167 | 57.4 | 2 |

[1910] The following pairs of compounds, which differ only at position 3, show the effects of replacing valine by isoleucine in different peptide backbones.

TABLE 8
Binding affinity of compstatin analogues to immobilized C3 determined by a surface plasmon resonance (SPR) assay.

| Comp | SPR Kd | | | | | | | | | | | | | | | | | |
|---|---|---|---|---|---|---|---|---|---|---|---|---|---|---|---|---|---|---|
| no | (nM) | | | 1 | 2 | 3 | 4 | 5 | 6 | 7 | 8 | 9 | 10 | 11 | 12 | 13 | | |
| 2 | 16 | Ac | | I | C(1) | I | W | Q | D | W | G | E | H | R | C(1) | T | | NH₂ |
| A | 130 | | | | | V | | | | | | | | | | | | |
| 15 | 14 | Ac | | I | C(1) | I | W | Q | D | W | G | E | H | R | C(1) | T | GAES | NH₂ |
| D | 230 | | | | | V | | | | | | | | | | | | |
| 21 | 16 | Ac | | I | C(1) | I | W | Q | D | W | G | E | H | R | C(1) | S | | NH₂ |
| G | 160 | | | | | V | | | | | | | | | | | | |
| 48 | 0.12 | H | dTyr | I | C(1) | I | 1MeTrp | Q | D | W | Sar | A | H | R | C(1) | NMelle | | NH₂ |
| Cp40 | 0.31 | | | | | V | | | | | | | | | | | | |

### Example 5: Profiling of Test Compounds in Non-Human Primates (NHP)

[1911] Healthy male Cynomolgus monkeys (Macaca fascicularis) received single subcutaneous administrations of each test substance. Compounds were formulated in 20 mM phosphate adjusted with NaOH to pH 7.5 and mannitol for isotonicity and dosed at 1840 nmol/kg. Blood was collected from a femoral vein from each animal at the following times: Pre-dose, 1, 2, 4, 8, 24, 48, 72, 96 and 120 h (10 sampling times). Blood was collected into serum separation tubes and allowed to clot at room temperature. The tubes were centrifuged and resulting serum was aliquoted and snap-frozen over dry-ice and stored at nominally −80° C. until analysis. All NHP studies were performed in accordance with animal welfare laws and regulations, including approval of the study by a local ethical review process.

[1912] Serum isolated from non-human primates at specific time points after dosing were analyzed for alternative pathway complement activity using the Complement system Alternative Pathway WIESLAB® kit from Svar Life Science (previously Euro diagnostic AB, Sweden) following the manufacturer's protocol. Briefly, serum samples or controls were diluted in buffer and incubated in microtitre strips coated with specific activators of the alternative pathway. The wells were washed and formed C5b-9 was detected using included colorimetric reagents.

[1913] Absorbance at 405 nm was measured. The percent activity of the alternative complement pathway was calculated for each animal and timepoint relative to the pre-dose activity (0 hours) of the individual animal with subtraction of the negative control. This reflects the pharmacological activity of the compounds.

[1914] In a separate experiment, healthy male Cynomolgus monkeys (Macaca fascicularis) received a 460 nmol/kg subcutaneous administrations of test substance 14 days prior to administration of 1840 nmol/kg of the same test substance. Blood was collected from a femoral vein from each animal at the following times based on the second dosing: Pre-dose, 0.25, 0.5, 2, 4, 24, 48, 72, 96 and 120 h (10 sampling times). The analysis of the sample was performed as described for the previous samples, however with single determinations of activity.

[1915] The results from the Alternative Pathway WIESLAB® kit are shown in FIG. 1. FIGS. 1a-1g show results of experiments performed without pre-dosing. FIG. 1h shows the results of the single experiment performed with pre-dosing.

[1916] In FIG. 1a, the non-acylated compound 61 had a relatively short duration of action despite high affinity for C3. The same is seen for the non-acylated compounds Cp40 (FIG. 1b) and compound 54 (FIG. 1e). By contrast, the acylated compounds in FIG. 1b, 1c, 1d, le, 1f and 1g in general possessed a longer-lasting pharmacological activity in vivo when compared to the non-acylated compounds despite lower affinity. Although acylation of peptides is generally known to increase the in vivo half-life, it was surprisingly found that the in vivo duration of the pharmacological efficacy was prolonged to this extent.

[1917] In order to assess pharmacokinetic half-life (t %/), serum samples isolated from non-human primates at specific time points after dosing were analysed for total drug compound after sample preparation by solid phase extraction (SPE) and liquid chromatography mass spectrometry (LC-MS/MS) using analogue internal standard. Single measurement of serum concentrations were used for calculation of the pharmacokinetic parameters using the non-compartmental approach in Phoenix WinNonlin 6.3. Plasma terminal elimination half-life (ty) was determined as In(2)/λz where λz is the magnitude of the slope of the log linear regression of the log concentration versus time profile during the terminal phase.

[1918] Pharmacokinetic (PK) data are shown in Table 9.

TABLE 9
PK data in NHP:

| | t½ |
|---|---|
| Compound | hours |
| Cp40 | 31.8 |
| 54 | 9.71 |
| 61 | 23.3 |
| 104 | 96.3 |
| 106 | 93.9 |
| 107 | 20.1 |
| 111 | 157 |
| 118 | 78.7 |
| 118 | 155 |
| 119 | 139 |
| 122 | 127 |
| 123 | 105 |
| 124 | 112 |
| 139 | 82 |
| 140 | 100 |
| 141 | 145 |
| 142 | 143 |
| 146 | 117 |
| 147 | 108 |
| 148 | 129 |
| 150 | 120 |

[1919] Determinations are approximate, as t % determined over less than three times the expected half-life.

### Example 6: Chemical Stability of Cystathionine-Bridged Compstatin Analogues

[1920] Materials and Methods

[1921] Chemical stability of compstatin analogues with cystathionine or disulfide bridge. Stability was assessed in three formulations at 50 mg/mL peptide, F1:20 mM phosphate pH 5.5, F2:20 mM phosphate pH 6.5 and F3:20 mM phosphate pH 7.5. The formulations were prepared by direct dissolution of peptide from lyophilized portions in the respective formulations. pH was adjusted to target with 1 M NaOH and 1 M HCl.

[1922] Chemical stability was assessed under accelerated conditions (14 days, 40° C.) and evaluated as change in purity by reverse phase HPLC, and change in covalent oligomer content by denaturing SEC. The formulations were placed at 40° C. with analysis points at T=0, 7 and 14 days. On each time point a small volume was extracted and diluted to 2 mg/mL and tested by reverse phase HPLC and denaturing SEC.

[1923] Reverse Phase HPLC Method for Purity Determination

[1924] Purity was assessed by reverse phase HPLC using an Ultimate 3000 system for binary gradient application equipped with a Kinetix C18 column (cat. no. 00F-4462-Y0, 150 mm×3 mm, 2.6 μm) run at 0.5 ml/min with a gradient of buffer A (0.3% TFA, aq.) and buffer B (0.3% TFA, 90% MeCN, aq.) gradient from 40% B to 70% B over 20 min. Detection was done using a diode array detector set to 220 nm.

[1925] Denaturing SEC Method for Purity Determination

[1926] Covalent oligomer formation was assessed by denaturing SEC (size exclusion chromatography) using an Ultimate 3000 system equipped with a TSKgel SuperSW 2000 column (cat. no. 818674, 300 mm×3 mm, 4 μm) run at 0.5 ml/min with isocratic flow of buffer A (0.1% TFA, 45% MeCN, aq.), 10 min. Detection was done using a diode array detector set to 215 nm.

[1927] Chemical Stability of Comp. No. 126 (Disulfide) and 156 (Cystathionine):

[1928] Sample Preparation:

[1929] Compounds 126 and 156 were carefully weighed out and dissolved in formulations F1, F2 and F3 to a target concentration of 50 mg/mL. Once visually dissolved, concentration was confirmed by absorbance at 280 nm, and samples were placed in stability at 40° C.

[1930] Chemical Stability Assay:

[1931] Samples for analysis were extracted on T=0, 7 and 14 days from a 40° C. climate chamber. The extracted volume was dissolved 1:25 (final concentration: 2 mg/mL) in 20 mM phosphate pH 5.5, 6.5 or 7.5 and measured by reverse phase HPLC and denaturing SEC by injection of 0.4 μL (column load 0.8 pg).

[1932] The resulting chromatograms were integrated to determine chemical purity by reverse phase HPLC and covalent oligomer content by denaturing SEC. The change in purity and corresponding increase in covalent oligomer content shows that compound 156 is significantly more stable than compound 126, as shown in FIG. 2.

[1933] Chemical purity data from 2-week storage at 40° C. of five disulfide based compounds (compound 111, 119, 123, 126 and 142) and five cystathionine based compounds (compounds 147, 148, 150, 153 and 156) are summarized in Table 10.

[1934] The data show that the compounds with a cystathionine bridge have significantly better chemical stability than compounds with a disulfide bridge at pH 5.5-7.5.

TABLE 10
Normalized purity (HPLC) and covalent oligomer
content (SEC) of peptides after 14 days storage
at 40° C. in formulations F1, F2 and F3.

| | | Purity after 14 days 40° C. | | |
|---|---|---|---|---|
| Compound | Bridge | (%) | | |
| number | chemistry | F1 | F2 | F3 |
| Compound 111 | Disulfide | 80 | 24 | 33 |
| Compound 119 | Disulfide | 23 | 31 | 46 |
| Compound 123 | Disulfide | 56 | 54 | 54 |
| Compound 126 | Disulfide | 45 | 47 | 57 |
| Compound 142 | Disulfide | 50 | 37 | 45 |
| Compound 147 | Cystathionine | 98 | 99 | 99 |
| Compound 148 | Cystathionine | 93 | 97 | 97 |
| Compound 150 | Cystathionine | 98 | 100 | 100 |
| Compound 153 | Cystathionine | 97 | 99 | 99 |
| Compound 156 | Cystathionine | 92 | 96 | 95 |

| | | Covalent oligomer content after | | |
|---|---|---|---|---|
| Compound | Bridge | 14 days 40° C. (%) | | |
| number | chemistry | F1 | F2 | F2 |
| Compound 111 | Disulfide | 30 | 77 | 61 |
| Compound 119 | Disulfide | 80 | 66 | 48 |
| Compound 123 | Disulfide | 52 | 48 | 45 |
| Compound 126 | Disulfide | 66 | 54 | 41 |
| Compound 142 | Disulfide | 63 | 64 | 56 |
| Compound 147 | Cystathionine | 0.6 | 0.1 | 0.2 |
| Compound 148 | Cystathionine | 0.7 | 0.0 | 0.1 |
| Compound 150 | Cystathionine | 0.7 | 0.1 | 0.1 |
| Compound 153 | Cystathionine | 0.7 | 0.5 | 0.3 |
| Compound 156 | Cystathionine | 1.1 | 0.5 | 1.1 |

The application's sequence listing, which the Patent Office published only in electronic form, follows.

SEQUENCE LISTING (901 sequences)

SEQ ID NO: 1 - protein, 13 aa, Artificial Sequence
  compstatin peptide
  DISULFID (2)..(12)
ICVVQDWGHHRCT

SEQ ID NO: 2 - protein, 27 aa, Artificial Sequence
  compstatin analogue
  MISC_FEATURE (1)..(6): Xaa = absent or an amino acid residue selected from A, E, G, L, K, F, P, S, T, W, Y, R, V, Sar, epsilonLys, gammaGlu, betaAsp, or betaAla, or a corresponding D form thereof; or Peg3, Peg4, or 8-aminooctanoyl, or derivatives thereof
  MISC_FEATURE (7)..(7): Xaa = I, Y, F or Sar
  DISULFID (8)..(18)
  MISC_FEATURE (10)..(10): Xaa =W, F, V, Y, 1-Me-Trp, D-Trp, N-Me-Trp, 1-For-Trp, 1-Nal, 2-Nal, 5-Me-Trp, Bpa or 2-Igl
  MISC_FEATURE (12)..(12): Xaa = E, K or D
  MISC_FEATURE (14)..(14): Xaa = G or Sar
  MISC_FEATURE (15)..(15): Xaa = H, A, E, D, K, R or S
  MISC_FEATURE (17)..(17): Xaa = R, S or K
  MISC_FEATURE (17)..(17): Xaa = R, S or K
  MISC_FEATURE (19)..(19): Xaa = T, S, E, F, H, K, Sar, G, I, D, N-Me-Ile or N-Me-Thr
  MISC_FEATURE (20)..(27): Xaa = absent or amino acid residue selected from A, E, G, L, K, F, P, S, T, W, Y, R, V, Sar, epsilonLys, gammaGlu, betaAsp, or betaAla, or a corresponding D form thereof; or Peg3, Peg4, or 8-aminooctanoyl, or derivatives thereof
XXXXXXXXIXQXWXXHXXXXXXXXXXX

SEQ ID NO: 3 - protein, 27 aa, Artificial Sequence
  compstatin analogue
  MISC_FEATURE (1)..(6): Xaa =  absent or an amino acid residue selected from A, E, G, L, K, F, P, S, T, W, Y, R, V, Sar, epsilonLys, gammaGlu, betaAsp, or betaAla, or a corresponding D form thereof, or Peg3, Peg4, or 8-aminooctanoyl, or derivatives thereof
  MISC_FEATURE (7)..(7): Xaa =  I, Y, F or Sar;
  THIOETH (8)..(18)
  MISC_FEATURE (10)..(10): Xaa =  W, V, Y, 2-Nal, 1-Nal or 1-Me-Trp
  MISC_FEATURE (12)..(12): Xaa =  E or D
  MISC_FEATURE (14)..(14): Xaa =  G or Sar
  MISC_FEATURE (15)..(15): Xaa =  A, E, D, K or S
  MISC_FEATURE (17)..(17): Xaa = R, S or K
  MISC_FEATURE (19)..(19): Xaa = T, S, E, I, Sar, K, G or N-Me-Ile
  MISC_FEATURE (20)..(27): Xaa = absent or an amino acid residue selected from A, E, G, L, K, F, P, S, T, W, Y, R, V, Sar, epsilonLys, gammaGlu, betaAsp, or betaAla, or a corresponding D form thereof; or Peg3 or Peg4, or 8-aminooctanoyl, or derivatives thereof
XXXXXXXXIXQXWXXHXXXXXXXXXXX

SEQ ID NO: 4 - protein, 27 aa, Artificial Sequence
  compstatin analogue
  MISC_FEATURE (1)..(6): Xaa = absent or an amino acid residue selected from A, E, G, L, K, F, P, S, T, W, Y, R, V, Sar, epsilonLys, gammaGlu, betaAsp, or betaAla, or a corresponding D form thereof, or Peg3, Peg4, or 8-aminooctanoyl, or derivatives thereof
  MISC_FEATURE (7)..(7): Xaa = I, Y, F or Sar
  THIOETH (8)..(18)
  MISC_FEATURE (10)..(10): Xaa = W, V, Y,1-Nal, 2-Nal or 1-Me-Trp
  MISC_FEATURE (12)..(12): Xaa = E or D
  MISC_FEATURE (15)..(15): Xaa = A, E, D, K or S
  MISC_FEATURE (17)..(17): Xaa = R, S or K
  MISC_FEATURE (19)..(19): Xaa = T, I, S, E, K or Sar
  MISC_FEATURE (19)..(19): Xaa = T, I, S, E, K or Sar
  MISC_FEATURE (20)..(27): Xaa = absent or an amino acid residue selected from A, E, G, L, K, F, P, S, T, W, Y, R, V, Sar, epsilonLys, gammaGlu, betaAsp, or betaAla, or a corresponding D form thereof; or Peg3 or Peg4, or 8-aminooctanoyl, or derivatives thereof
XXXXXXXXIXQXWGXHXXXXXXXXXXX

SEQ ID NO: 5 - protein, 27 aa, Artificial Sequence
  compstatin analogue
  MISC_FEATURE (1)..(6): Xaa = absent or an amino acid residue selected from A, E, G, L, K, F, P, S, T, W, Y, R, V, Sar, epsilonLys, gammaGlu, betaAsp, or betaAla, or a corresponding D form thereof, or Peg3, Peg4, or 8-aminooctanoyl, or derivatives thereof
  MISC_FEATURE (7)..(7): Xaa = I, Y, F or Sar
  THIOETH (8)..(18)
  MISC_FEATURE (10)..(10): Xaa = W, V, Y, 1-Nal, 2-Nal or 1-Me-Trp
  MISC_FEATURE (12)..(12): Xaa = E or D
  MISC_FEATURE (19)..(19): Xaa = T, S, E or Sar
  MISC_FEATURE (19)..(19): Xaa = T, S, E or Sar
  MISC_FEATURE (20)..(27): Xaa = absent or amino acid residue selected from A, E, G, L, K, F, P, S, T, W, Y, R, V, Sar, epsilonLys, gammaGlu, betaAsp, or betaAla, or a corresponding D form thereof; or Peg3 or Peg4, or 8-aminooctanoyl, or derivatives thereof
XXXXXXXXIXQXWGXHRXXXXXXXXXX

SEQ ID NO: 6 - protein, 25 aa, Artificial Sequence
  compstatin analogue
  MISC_FEATURE (1)..(6): Xaa = absent or an amino acid residue selected from A, E, G, L, K, F, P, S, T, W, Y, R, V, Sar, epsilonLys, gammaGlu, betaAsp, or betaAla, or a corresponding D form thereof, or Peg3, Peg4, or 8-aminooctanoyl, or derivatives thereof
  MISC_FEATURE (7)..(7): Xaa = Y or F
  THIOETH (8)..(18)
  MISC_FEATURE (10)..(10): Xaa = W, Y, 1-Me-Trp
  MISC_FEATURE (12)..(12): Xaa = E or D
  MISC_FEATURE (15)..(15): Xaa = A, E or K
  MISC_FEATURE (19)..(19): Xaa = T, E or Sar
  MISC_FEATURE (20)..(25): Xaa = absent or an amino acid residue selected from A, E, G, L, K, F, P, S, T, W, Y, R, V, Sar, epsilonLys, gammaGlu, betaAsp, or betaAla, or a corresponding D form thereof, or Peg3, Peg4, or 8-aminooctanoyl, or derivatives thereof
XXXXXXXXIXQXWGXHRXXXXXXXX

SEQ ID NO: 7 - protein, 25 aa, Artificial Sequence
  compstatin analogue
  MISC_FEATURE (1)..(6): Xaa = absent or an amino acid residue selected from A, E, G, L, K, F, P, S, T, W, Y, R, V, Sar, epsilonLys, gammaGlu, betaAsp, or betaAla, or a corresponding D form thereof, or Peg3, Peg4, or 8-aminooctanoyl, or derivatives thereof
  MISC_FEATURE (7)..(7): Xaa = Y or F
  THIOETH (8)..(18)
  MISC_FEATURE (10)..(10): Xaa = 1-Me-Trp
  MISC_FEATURE (12)..(12): Xaa = E or D
  MISC_FEATURE (19)..(19): Xaa = T, E or Sar
  MISC_FEATURE (20)..(25): Xaa = absent or an amino acid residue selected from A, E, G, L, K, F, P, S, T, W, Y, R, V, Sar, epsilonLys, gammaGlu, betaAsp, or betaAla, or a corresponding D form thereof; or Peg3 or Peg4, or 8-aminooctanoyl, or derivatives thereof
XXXXXXXXIXQXWGEHRXXXXXXXX

SEQ ID NO: 8 - protein, 27 aa, Artificial Sequence
  compstatin analogue
  MISC_FEATURE (1)..(6): Xaa = absent or an amino acid residue selected from A, E, G, K, K(bearing a lipophilic group covalently linked to its side chain), S, Y, or a corresponding D form thereof
  MISC_FEATURE (7)..(7): Xaa = I, Y, F or Sar
  THIOETH (8)..(18)
  MISC_FEATURE (10)..(10): Xaa = W, V, 1-Me-Trp, 1-Nal or 2-Nal
  MISC_FEATURE (12)..(12): Xaa = E, K or D
  MISC_FEATURE (14)..(14): Xaa = G or Sar
  MISC_FEATURE (15)..(15): Xaa = H, A, E, D, K, R or S
  MISC_FEATURE (17)..(17): Xaa = R, S,  K or K (bearing a lipophilic group covalently linked to its side chain)
  MISC_FEATURE (19)..(19): Xaa = T, S, E, Sar or N-Me-Ile
  MISC_FEATURE (20)..(27): Xaa = absent or an amino acid residue selected from A, E, G, K, K (bearing a lipophilic group covalently linked to its side chain), P, S, Peg3, gammaGlu, 8-aminooctanoyl, or a corresponding D form thereof
XXXXXXXXIXQXWXXHXXXXXXXXXXX

SEQ ID NO: 9 - protein, 27 aa, Artificial Sequence
  compstatin analogue
  MISC_FEATURE (1)..(6): Xaa = absent or an amino acid residue selected from A, E, G, L, K, K (bearing a lipophilic group covalently linked to its side chain), F, P, S, T, W, Y, R, V or Sar, or a corresponding D form thereof
  MISC_FEATURE (7)..(7): Xaa = I, Y, F or Sar
  THIOETH (8)..(18)
  MISC_FEATURE (10)..(10): Xaa =W, V, Y, 2-Nal, 1-Nal or 1-Me-Trp
  MISC_FEATURE (12)..(12): Xaa = E or D
  MISC_FEATURE (14)..(14): Xaa = G or Sar
  MISC_FEATURE (15)..(15): Xaa = A, E, D, K or S
  MISC_FEATURE (17)..(17): Xaa = R, S or K(bearing a lipophilic group covalently linked to its side chain)
  MISC_FEATURE (19)..(19): Xaa = T, S, E, I, Sar, K, G or N-Me-Ile
  MISC_FEATURE (20)..(27): Xaa = absent or an amino acid residue selected from A, E, G, L, K, F, P, S, T, W, Y, R, V Sar, epsilonLys, gammaGlu, betaAsp, or betaAla, or a corresponding D form thereof; or Peg 3 or Peg4, or 8-aminooctanoyl, or derivatives thereof
XXXXXXXXIXQXWXXHXXXXXXXXXXX

SEQ ID NO: 10 - protein, 27 aa, Artificial Sequence
  compstatin analogue
  MISC_FEATURE (1)..(6): Xaa = absent or an amino acid residue selected from A, E, G, L, K, K (bearing a lipophilic group covalently attached to its side chain), F, P, S, T, W, Y, R, V or Sar, or a corresponding D form thereof
  MISC_FEATURE (7)..(7): Xaa = I, Y, F or Sar
  THIOETH (8)..(18)
  MISC_FEATURE (10)..(10): Xaa = W, V, Y, 1-Nal, 2-Nal or 1-Me-Trp
  MISC_FEATURE (12)..(12): Xaa = E or D
  MISC_FEATURE (15)..(15): Xaa = A, E, D, K or S
  MISC_FEATURE (17)..(17): Xaa = R, S or K (bearing a lipophilic group covalently attached to its side chain)
  MISC_FEATURE (19)..(19): Xaa = T, I, S, E, K or  Sar
  MISC_FEATURE (20)..(27): Xaa = absent or A,E,G,L,K,K (bearing a lipophilic group covalently attached to its sidechain) F,P,S,T,W,Y,R,V, Sar, epsilonLys, gammaGlu, betaAsp, or betaAla, or a corresponding D form; or Peg3 or Peg4, or 8-aminooctanoyl, or derivatives thereof
XXXXXXXXIXQXWGXHXXXXXXXXXXX

SEQ ID NO: 11 - protein, 27 aa, Artificial Sequence
  compstatin analogue
  MISC_FEATURE (1)..(6): Xaa = absent or an mino acid residue selected from A, E, G, L, K, K (bearing a lipophilic group covalently attached to its amino acid side chain), F, P, S, T, W, Y, R, V or Sar, or a corresponding D form thereof
  MISC_FEATURE (7)..(7): Xaa = I, Y, F or Sar
  THIOETH (8)..(18)
  MISC_FEATURE (10)..(10): Xaa = W, V, 1-Nal, 2-Nal or 1-Me-Trp
  MISC_FEATURE (12)..(12): Xaa = E or D
  MISC_FEATURE (15)..(15): Xaa = A, E, D, K or S
  MISC_FEATURE (19)..(19): Xaa = T, S, E or Sar
  MISC_FEATURE (20)..(27): Xaa = absent or A,E,G,L,K,K (bearing  a lipophilic group covalently attached to its amino acid), F,P,S,T,W,Y,R,V, Sar, epsilonLys, gammaGlu, betaAsp, or betaAla, or a corresponding D form; or Peg3 or Peg4, or 8-aminooctanoyl, or derivatives thereof
XXXXXXXXIXQXWGXHRXXXXXXXXXX

SEQ ID NO: 12 - protein, 27 aa, Artificial Sequence
  compstatin analogue
  MISC_FEATURE (1)..(6): Xaa =  absent or A, E, G, L, K, K (bearing a lipophilic group covalently attached to its side chain), F, P, S, T, W, Y, R, V or Sar, or a corresponding D form thereof
  MISC_FEATURE (7)..(7): Xaa =  Y or F
  THIOETH (8)..(18)
  MISC_FEATURE (12)..(12): Xaa =  is E or D
  MISC_FEATURE (14)..(14): Xaa =  G or Sar
  MISC_FEATURE (19)..(19): Xaa =  T, E or Sar
  MISC_FEATURE (20)..(27): Xaa =  absent or A,E,G,L,K, K(bearing a lipophilic group covalently attached to its side chain), F,P,S,T,W,Y,R,V Sar, epsilonLys, gammaGlu, betaAsp, or betaAla, or a corresponding D form; or Peg3 or Peg4, or 8-aminooctanoyl, or derivatives thereof
XXXXXXXXIXQXWXEHRXXXXXXXXXX

SEQ ID NO: 13 - protein, 13 aa, Artificial Sequence
  compstatin peptide
  MISC_FEATURE (1)..(1): Xaa = Sar
  MISC_FEATURE (2)..(2): Xaa = any amino acid whose side chain is linked by a thioether bond
  MISC_FEATURE (4)..(4): Xaa = 1-Me-Trp
  MISC_FEATURE (12)..(12): Xaa = any amino acid whose side chain is linked by a thioether bond
  MISC_FEATURE (13)..(13): Xaa = Sar
XXIXQDWGEHRXX

SEQ ID NO: 14 - protein, 13 aa, Artificial Sequence
  compstatin analogue
  MISC_FEATURE (1)..(1): Xaa = Sar
  MISC_FEATURE (2)..(2): Xaa = any amino acid whose side chain is linked by a thioether bond
  MISC_FEATURE (4)..(4): Xaa = 1-Me-Trp
  MISC_FEATURE (12)..(12): Xaa = any amino acid whose side chain is linked by a thioether bond
XXIXQDWGEHRXT

SEQ ID NO: 15 - protein, 13 aa, Artificial Sequence
  Compstatin analogue
  MISC_FEATURE (1)..(1): Xaa = Sar
  MISC_FEATURE (2)..(2): Xaa = any amino acid whose side chain is linked by a thioether bond
  MISC_FEATURE (4)..(4): Xaa = 1-Me-Trp
  MISC_FEATURE (8)..(8): Xaa = Sar
  MISC_FEATURE (12)..(12): Xaa = any amino acid whose side chain is linked by a thioether bond
XXIXQEWXEHRXT

SEQ ID NO: 16 - protein, 13 aa, Artificial Sequence
  Compstatin analogue
  MISC_FEATURE (1)..(1): Xaa = Sar
  MISC_FEATURE (2)..(2): Xaa = any amino acid whose side chain is linked by a thioether bond
  MISC_FEATURE (4)..(4): Xaa = 1-Me-Trp
  MISC_FEATURE (12)..(12): Xaa = any amino acid whose side chain is linked by a thioether bond
  MISC_FEATURE (13)..(13): Xaa = Sar
XXIXQEWGEHRXX

SEQ ID NO: 17 - protein, 13 aa, Artificial Sequence
  Compstatin analogue
  MISC_FEATURE (1)..(1): Xaa - Sar
  MISC_FEATURE (2)..(2): Xaa = any amino acid whose side chain is linked by a thioether bond
  MISC_FEATURE (12)..(12): Xaa = any amino acid whose side chain is linked by a thioether bond
XXIWQDWGEHRXT

SEQ ID NO: 18 - protein, 13 aa, Artificial Sequence
  Compstatin analogue
  MISC_FEATURE (2)..(2): Xaa = any amino acid whose side chain is linked by a thioether bond
  MISC_FEATURE (4)..(4): Xaa = 1-Me-Trp
  MISC_FEATURE (8)..(8): Xaa = Sar
  MISC_FEATURE (12)..(12): Xaa = any amino acid whose side chain is linked by a thioether bond
  MISC_FEATURE (13)..(13): Xaa = Sar
FXIXQDWXEHRXX

SEQ ID NO: 19 - protein, 13 aa, Artificial Sequence
  Compstatin analogue
  MISC_FEATURE (2)..(2): Xaa = any amino acid whose side chain is linked by a thioether bond
  MISC_FEATURE (4)..(4): Xaa = 1-Me-Trp
  MISC_FEATURE (8)..(8): Xaa = Ser
  MISC_FEATURE (12)..(12): Xaa = any amino acid whose side chain is linked by a thioether bond
FXIXQDWXEHRXT

SEQ ID NO: 20 - protein, 13 aa, Artificial Sequence
  Compstatin analogue
  MISC_FEATURE (2)..(2): Xaa = any amino acid whose side chain is linked by a thioether bond
  MISC_FEATURE (4)..(4): Xaa = 1-Me-Trp
  MISC_FEATURE (12)..(12): Xaa = any amino acid whose side chain is linked by a thioether bond
  MISC_FEATURE (13)..(13): Xaa = Sar
FXIXQDWGEHKXX

SEQ ID NO: 21 - protein, 13 aa, Artificial Sequence
  Compstatin analogue
  MISC_FEATURE (2)..(2): Xaa = any amino acid whose side chain is linked by a thioether bond
  MISC_FEATURE (4)..(4): Xaa = 1-Me-Trp
  MISC_FEATURE (12)..(12): Xaa = any amino acid whose side chain is linked by a thioether bond
  MISC_FEATURE (13)..(13): Xaa = Sar
FXIXQDWGEHRXX

SEQ ID NO: 22 - protein, 13 aa, Artificial Sequence
  Compstatin analogue
  MISC_FEATURE (2)..(2): Xaa = any amino acid whose side chain is linked by a thioether bond
  MISC_FEATURE (4)..(4): Xaa = 1-Me-Trp
  MISC_FEATURE (12)..(12): Xaa = any amino acid whose side chain is linked by a thioether bond
FXIXQDWGEHRXE

SEQ ID NO: 23 - protein, 13 aa, Artificial Sequence
  Compstatin analogue
  MISC_FEATURE (2)..(2): Xaa = any amino acid whose side chain is linked by a thioether bond
  MISC_FEATURE (4)..(4): Xaa = 1-Me-Trp
  MISC_FEATURE (12)..(12): Xaa = any amino acid whose side chain is linked by a thioether bond
FXIXQDWGEHRXS

SEQ ID NO: 24 - protein, 13 aa, Artificial Sequence
  Compstatin analogue
  MISC_FEATURE (2)..(2): Xaa = any amino acid whose side chain is linked by a thioether bond
  MISC_FEATURE (4)..(4): Xaa = 1-Me-Trp
  MISC_FEATURE (12)..(12): Xaa = any amino acid whose side chain is linked by a thioether bond
FXIXQDWGEHRXT

SEQ ID NO: 25 - protein, 13 aa, Artificial Sequence
  Compstatin analogue
  MISC_FEATURE (2)..(2): Xaa = any amino acid whose side chain is linked by a thioether bond
  MISC_FEATURE (4)..(4): Xaa = 1-Me-Trp
  MISC_FEATURE (12)..(12): Xaa = any amino acid whose side chain is linked by a thioether bond
  MISC_FEATURE (13)..(13): Xaa = Sar
FXIXQEWGEHRXX

SEQ ID NO: 26 - protein, 13 aa, Artificial Sequence
  Compstatin analogue
  MISC_FEATURE (2)..(2): Xaa = any amino acid whose side chain is linked by a thioether bond
  MISC_FEATURE (4)..(4): Xaa = 1-Nal
  MISC_FEATURE (12)..(12): Xaa = any amino acid whose side chain is linked by a thioether bond
FXIXQDWGEHRXT

SEQ ID NO: 27 - protein, 13 aa, Artificial Sequence
  Compstatin analogue
  MISC_FEATURE (2)..(2): Xaa = any amino acid whose side chain is linked by a thioether bond
  MISC_FEATURE (4)..(4): Xaa = 2-Nal
  MISC_FEATURE (12)..(12): Xaa = any amino acid whose side chain is linked by a thioether bond
FXIXQDWGEHRXT

SEQ ID NO: 28 - protein, 13 aa, Artificial Sequence
  Compstatin analogue
  MISC_FEATURE (2)..(2): Xaa = any amino acid whose side chain is linked by a thioether bond
  MISC_FEATURE (12)..(12): Xaa = any amino acid whose side chain is linked by a thioether bond
  MISC_FEATURE (13)..(13): Xaa = sar
FXIWQDWGEHRXX

SEQ ID NO: 29 - protein, 13 aa, Artificial Sequence
  Compstatin analogue
  MISC_FEATURE (2)..(2): Xaa = any amino acid whose side chain is linked by a thioether bond
  MISC_FEATURE (12)..(12): Xaa = any amino acid whose side chain is linked by a thioether bond
FXIWQDWGEHRXT

SEQ ID NO: 30 - protein, 13 aa, Artificial Sequence
  Compstatin analogue
  MISC_FEATURE (2)..(2): Xaa = any amino acid whose side chain is linked by a thioether bond
  MISC_FEATURE (4)..(4): Xaa = 1-Me-Trp
  MISC_FEATURE (8)..(8): Xaa = Sar
  MISC_FEATURE (12)..(12): Xaa = any amino acid whose side chain is linked by a thioether bond
  MISC_FEATURE (13)..(13): Xaa = N-Me-Ile
IXIXQDWXAHRXX

SEQ ID NO: 31 - protein, 13 aa, Artificial Sequence
  Compstatin analogue
  MISC_FEATURE (2)..(2): Xaa = any amino acid whose side chain is linked by a thioether bond
  MISC_FEATURE (4)..(4): Xaa = 1-Me-Trp
  MISC_FEATURE (12)..(12): Xaa = any amino acid whose side chain is linked by a thioether bond
  MISC_FEATURE (13)..(13): Xaa = Sar
IXIXQDWGEHRXX

SEQ ID NO: 32 - protein, 13 aa, Artificial Sequence
  Compstatin analogue
  MISC_FEATURE (2)..(2): Xaa = any amino acid whose side chain is linked by a thioether bond
  MISC_FEATURE (4)..(4): Xaa = 1-Me-Trp
  MISC_FEATURE (12)..(12): Xaa = any amino acid whose side chain is linked by a thioether bond
IXIXQDWGEHRXT

SEQ ID NO: 33 - protein, 13 aa, Artificial Sequence
  Compstatin analogue
  MISC_FEATURE (2)..(2): Xaa = any amino acid whose side chain is linked by a thioether bond
  MISC_FEATURE (4)..(4): Xaa = 2-Nal
  MISC_FEATURE (12)..(12): Xaa = any amino acid whose side chain is linked by a thioether bond
  MISC_FEATURE (13)..(13): Xaa = Sar
IXIXQDWGEHRXX

SEQ ID NO: 34 - protein, 13 aa, Artificial Sequence
  Compstatin analogue
  MISC_FEATURE (2)..(2): Xaa = any amino acid whose side chain is linked by a thioether bond
  MISC_FEATURE (12)..(12): Xaa = any amino acid whose side chain is linked by a thioether bond
IXIWQDWGAHRXE

SEQ ID NO: 35 - protein, 13 aa, Artificial Sequence
  Compstatin analogue
  MISC_FEATURE (2)..(2): Xaa = any amino acid whose side chain is linked by a thioether bond
  MISC_FEATURE (12)..(12): Xaa = any amino acid whose side chain is linked by a thioether bond
IXIWQDWGAHRXT

SEQ ID NO: 36 - protein, 13 aa, Artificial Sequence
  Compstatin analogue
  MISC_FEATURE (2)..(2): Xaa = any amino acid whose side chain is linked by a thioether bond
  MISC_FEATURE (12)..(12): Xaa = any amino acid whose side chain is linked by a thioether bond
IXIWQDWGAHSXT

SEQ ID NO: 37 - protein, 13 aa, Artificial Sequence
  Compstatin analogue
  MISC_FEATURE (2)..(2): Xaa = any amino acid whose side chain is linked by a thioether bond
  MISC_FEATURE (12)..(12): Xaa = any amino acid whose side chain is linked by a thioether bond
IXIWQDWGDHRXT

SEQ ID NO: 38 - protein, 13 aa, Artificial Sequence
  Compstatin analogue
  MISC_FEATURE (2)..(2): Xaa = any amino acid whose side chain is linked by a thioether bond
  MISC_FEATURE (12)..(12): Xaa = any amino acid whose side chain is linked by a thioether bond
  MISC_FEATURE (13)..(13): Xaa = Sar
IXIWQDWGEHRXX

SEQ ID NO: 39 - protein, 13 aa, Artificial Sequence
  Compstatin analogue
  MISC_FEATURE (2)..(2): Xaa = any amino acid whose side chain is linked by a thioether bond
  MISC_FEATURE (12)..(12): Xaa = any amino acid whose side chain is linked by a thioether bond
IXIWQDWGEHRXE

SEQ ID NO: 40 - protein, 13 aa, Artificial Sequence
  Compstatin analogue
  MISC_FEATURE (2)..(2): Xaa = any amino acid whose side chain is linked by a thioether bond
  MISC_FEATURE (12)..(12): Xaa = any amino acid whose side chain is linked by a thioether bond
IXIWQDWGEHRXS

SEQ ID NO: 41 - protein, 13 aa, Artificial Sequence
  Compstatin analogue
  MISC_FEATURE (2)..(2): Xaa = any amino acid whose side chain is linked by a thioether bond
  MISC_FEATURE (12)..(12): Xaa = any amino acid whose side chain is linked by a thioether bond
IXIWQDWGEHRXT

SEQ ID NO: 42 - protein, 13 aa, Artificial Sequence
  Compstatin analogue
  MISC_FEATURE (2)..(2): Xaa = any amino acid whose side chain is linked by a thioether bond
  MISC_FEATURE (12)..(12): Xaa = any amino acid whose side chain is linked by a thioether bond
IXIWQDWGEHSXT

SEQ ID NO: 43 - protein, 13 aa, Artificial Sequence
  Compstatin analogue
  MISC_FEATURE (2)..(2): Xaa = any amino acid whose side chain is linked by a thioether bond
  MISC_FEATURE (12)..(12): Xaa = any amino acid whose side chain is linked by a thioether bond
IXIWQDWGKHRXT

SEQ ID NO: 44 - protein, 13 aa, Artificial Sequence
  Compstatin analogue
  MISC_FEATURE (2)..(2): Xaa = any amino acid whose side chain is linked by a thioether bond
  MISC_FEATURE (12)..(12): Xaa = any amino acid whose side chain is linked by a thioether bond
IXIWQDWGRHRXT

SEQ ID NO: 45 - protein, 13 aa, Artificial Sequence
  Compstatin analogue
  MISC_FEATURE (2)..(2): Xaa = any amino acid whose side chain is linked by a thioether bond
  MISC_FEATURE (12)..(12): Xaa = any amino acid whose side chain is linked by a thioether bond
IXIWQDWGSHRXT

SEQ ID NO: 46 - protein, 13 aa, Artificial Sequence
  Compstatin analogue
  MISC_FEATURE (2)..(2): Xaa = any amino acid whose side chain is linked by a thioether bond
  MISC_FEATURE (12)..(12): Xaa = any amino acid whose side chain is linked by a thioether bond
IXIWQEWGEHRXT

SEQ ID NO: 47 - protein, 13 aa, Artificial Sequence
  Compstatin analogue
  MISC_FEATURE (2)..(2): Xaa = any amino acid whose side chain is linked by a thioether bond
  MISC_FEATURE (12)..(12): Xaa = any amino acid whose side chain is linked by a thioether bond
IXIWQKWGAHRXT

SEQ ID NO: 48 - protein, 13 aa, Artificial Sequence
  Compstatin analogue
  MISC_FEATURE (2)..(2): Xaa = any amino acid whose side chain is linked by a thioether bond
  MISC_FEATURE (12)..(12): Xaa = any amino acid whose side chain is linked by a thioether bond
IXIWQKWGEHRXT

SEQ ID NO: 49 - protein, 13 aa, Artificial Sequence
  Compstatin analogue
  MISC_FEATURE (2)..(2): Xaa = any amino acid whose side chain is linked by a thioether bond
  MISC_FEATURE (4)..(4): Xaa = 1-Me-Trp
  MISC_FEATURE (12)..(12): Xaa = any amino acid whose side chain is linked by a thioether bond
  MISC_FEATURE (13)..(13): Xaa = Sar
YXIXQDWGEHRXX

SEQ ID NO: 50 - protein, 13 aa, Artificial Sequence
  Compstatin analogue
  MISC_FEATURE (2)..(2): Xaa = any amino acid whose side chain is linked by a thioether bond
  MISC_FEATURE (4)..(4): Xaa = 1-Me-Trp
  MISC_FEATURE (12)..(12): Xaa = any amino acid whose side chain is linked by a thioether bond
YXIXQDWGEHRXT

SEQ ID NO: 51 - protein, 13 aa, Artificial Sequence
  Compstatin analogue
  MISC_FEATURE (2)..(2): Xaa = any amino acid whose side chain is linked by a thioether bond
  MISC_FEATURE (4)..(4): Xaa = 1-Me-Trp
  MISC_FEATURE (12)..(12): Xaa = any amino acid whose side chain is linked by a thioether bond
  MISC_FEATURE (13)..(13): Xaa = Sar
YXIXQEWGEHRXX

SEQ ID NO: 52 - protein, 13 aa, Artificial Sequence
  Compstatin analogue
  MISC_FEATURE (2)..(2): Xaa = any amino acid whose side chain is linked by a thioether bond
  MISC_FEATURE (4)..(4): Xaa = 2-Nal
  MISC_FEATURE (12)..(12): Xaa = any amino acid whose side chain is linked by a thioether bond
YXIXQDWGEHRXT

SEQ ID NO: 53 - protein, 13 aa, Artificial Sequence
  Compstatin analogue
  MISC_FEATURE (2)..(2): Xaa = any amino acid whose side chain is linked by a thioether bond
  MISC_FEATURE (12)..(12): Xaa = any amino acid whose side chain is linked by a thioether bond
YXIWQDWGEHRXT

SEQ ID NO: 54 - protein, 13 aa, Artificial Sequence
  Compstatin analogue
  MISC_FEATURE (2)..(2): Xaa = any amino acid whose side chain is linked by a thioether bond
  MISC_FEATURE (4)..(4): Xaa = 1-Me-Trp
  MISC_FEATURE (11)..(11): Xaa = Lys bearing a lipophilic group covalently attached to its side chain
  MISC_FEATURE (12)..(12): Xaa = any amino acid whose side chain is linked by a thioether bond
  MISC_FEATURE (13)..(13): Xaa = Sar
YXIXQDWGEHXXX

SEQ ID NO: 55 - protein, 13 aa, Artificial Sequence
  Compstatin analogue
  MISC_FEATURE (2)..(2): Xaa = any amino acid whose side chain is linked by a thioether bond
  MISC_FEATURE (4)..(4): Xaa = 1-Me-Trp
  MISC_FEATURE (8)..(8): Xaa = Sar
  MISC_FEATURE (12)..(12): Xaa = any amino acid whose side chain is linked by a thioether bond
  MISC_FEATURE (13)..(13): Xaa = Sar
YXIXQEWXEHRXX

SEQ ID NO: 56 - protein, 13 aa, Artificial Sequence
  compstatin peptide
  MISC_FEATURE (1)..(1): Xaa = Sar
  MISC_FEATURE (2)..(2): Xaa = Homocysteine whose side chain forms a cystathionine bridge
  MISC_FEATURE (4)..(4): Xaa = 1-Me-Trp
  MISC_FEATURE (12)..(12): Alanine whose side chain forms a cystathionine bridge
  MISC_FEATURE (13)..(13): Xaa = Sar
XXIXQDWGEHRAX

SEQ ID NO: 57 - protein, 13 aa, Artificial Sequence
  compstatin analogue
  MISC_FEATURE (1)..(1): Xaa = Sar
  MISC_FEATURE (2)..(2): Xaa = Homocysteine whose side chain forms a cystathionine bridge
  MISC_FEATURE (4)..(4): Xaa = 1-Me-Trp
  MISC_FEATURE (12)..(12): Alanine whose side chain forms a cystathionine bridge
XXIXQDWGEHRAT

SEQ ID NO: 58 - protein, 13 aa, Artificial Sequence
  Compstatin analogue
  MISC_FEATURE (1)..(1): Xaa = Sar
  MISC_FEATURE (2)..(2): Xaa = Homocysteine whose side chain forms a cystathionine bridge
  MISC_FEATURE (4)..(4): Xaa = 1-Me-Trp
  MISC_FEATURE (8)..(8): Xaa = Sar
  MISC_FEATURE (12)..(12): Alanine whose side chain forms a cystathionine bridge
XXIXQEWXEHRAT

SEQ ID NO: 59 - protein, 13 aa, Artificial Sequence
  Compstatin analogue
  MISC_FEATURE (1)..(1): Xaa = Sar
  MISC_FEATURE (2)..(2): Xaa = Homocysteine whose side chain forms a cystathionine bridge
  MISC_FEATURE (4)..(4): Xaa = 1-Me-Trp
  MISC_FEATURE (12)..(12): Alanine whose side chain forms a cystathionine bridge
  MISC_FEATURE (13)..(13): Xaa = Sar
XXIXQEWGEHRAX

SEQ ID NO: 60 - protein, 13 aa, Artificial Sequence
  Compstatin analogue
  MISC_FEATURE (1)..(1): Xaa - Sar
  MISC_FEATURE (2)..(2): Xaa = Homocysteine whose side chain forms a cystathionine bridge
  MISC_FEATURE (12)..(12): Alanine whose side chain forms a cystathionine bridge
XXIWQDWGEHRAT

SEQ ID NO: 61 - protein, 13 aa, Artificial Sequence
  Compstatin analogue
  MISC_FEATURE (2)..(2): Xaa = Homocysteine whose side chain forms a cystathionine bridge
  MISC_FEATURE (4)..(4): Xaa = 1-Me-Trp
  MISC_FEATURE (8)..(8): Xaa = Sar
  MISC_FEATURE (12)..(12): Alanine whose side chain forms a cystathionine bridge
  MISC_FEATURE (13)..(13): Xaa = Sar
FXIXQDWXEHRAX

SEQ ID NO: 62 - protein, 13 aa, Artificial Sequence
  Compstatin analogue
  MISC_FEATURE (2)..(2): Xaa = Homocysteine whose side chain forms a cystathionine bridge
  MISC_FEATURE (4)..(4): Xaa = 1-Me-Trp
  MISC_FEATURE (8)..(8): Xaa = Ser
  MISC_FEATURE (12)..(12): Alanine whose side chain forms a cystathionine bridge
FXIXQDWXEHRAT

SEQ ID NO: 63 - protein, 13 aa, Artificial Sequence
  Compstatin analogue
  MISC_FEATURE (2)..(2): Xaa = Homocysteine whose side chain forms a cystathionine bridge
  MISC_FEATURE (4)..(4): Xaa = 1-Me-Trp
  MISC_FEATURE (12)..(12): Alanine whose side chain forms a cystathionine bridge
  MISC_FEATURE (13)..(13): Xaa = Sar
FXIXQDWGEHKAX

SEQ ID NO: 64 - protein, 13 aa, Artificial Sequence
  Compstatin analogue
  MISC_FEATURE (2)..(2): Xaa = Homocysteine whose side chain forms a cystathionine bridge
  MISC_FEATURE (4)..(4): Xaa = 1-Me-Trp
  MISC_FEATURE (12)..(12): Alanine whose side chain forms a cystathionine bridge
  MISC_FEATURE (13)..(13): Xaa = Sar
FXIXQDWGEHRAX

SEQ ID NO: 65 - protein, 13 aa, Artificial Sequence
  Compstatin analogue
  MISC_FEATURE (2)..(2): Xaa = Homocysteine whose side chain forms a cystathionine bridge
  MISC_FEATURE (4)..(4): Xaa = 1-Me-Trp
  MISC_FEATURE (12)..(12): Alanine whose side chain forms a cystathionine bridge
FXIXQDWGEHRAE

SEQ ID NO: 66 - protein, 13 aa, Artificial Sequence
  Compstatin analogue
  MISC_FEATURE (2)..(2): Xaa = Homocysteine whose side chain forms a cystathionine bridge
  MISC_FEATURE (4)..(4): Xaa = 1-Me-Trp
  MISC_FEATURE (12)..(12): Alanine whose side chain forms a cystathionine bridge
FXIXQDWGEHRAS

SEQ ID NO: 67 - protein, 13 aa, Artificial Sequence
  Compstatin analogue
  MISC_FEATURE (2)..(2): Xaa = Homocysteine whose side chain forms a cystathionine bridge
  MISC_FEATURE (4)..(4): Xaa = 1-Me-Trp
  MISC_FEATURE (12)..(12): Alanine whose side chain forms a cystathionine bridge
FXIXQDWGEHRAT

SEQ ID NO: 68 - protein, 13 aa, Artificial Sequence
  Compstatin analogue
  MISC_FEATURE (2)..(2): Xaa = Homocysteine whose side chain forms a cystathionine bridge
  MISC_FEATURE (4)..(4): Xaa = 1-Me-Trp
  MISC_FEATURE (12)..(12): Alanine whose side chain forms a cystathionine bridge
  MISC_FEATURE (13)..(13): Xaa = Sar
FXIXQEWGEHRAX

SEQ ID NO: 69 - protein, 13 aa, Artificial Sequence
  Compstatin analogue
  MISC_FEATURE (2)..(2): Xaa = Homocysteine whose side chain forms a cystathionine bridge
  MISC_FEATURE (4)..(4): Xaa = 1-Nal
  MISC_FEATURE (12)..(12): Alanine whose side chain forms a cystathionine bridge
FXIXQDWGEHRAT

SEQ ID NO: 70 - protein, 13 aa, Artificial Sequence
  Compstatin analogue
  MISC_FEATURE (2)..(2): Xaa = Homocysteine whose side chain forms a cystathionine bridge
  MISC_FEATURE (4)..(4): Xaa = 2-Nal
  MISC_FEATURE (12)..(12): Alanine whose side chain forms a cystathionine bridge
FXIXQDWGEHRAT

SEQ ID NO: 71 - protein, 13 aa, Artificial Sequence
  Compstatin analogue
  MISC_FEATURE (2)..(2): Xaa = Homocysteine whose side chain forms a cystathionine bridge
  MISC_FEATURE (12)..(12): Alanine whose side chain forms a cystathionine bridge
  MISC_FEATURE (13)..(13): Xaa = sar
FXIWQDWGEHRAX

SEQ ID NO: 72 - protein, 13 aa, Artificial Sequence
  Compstatin analogue
  MISC_FEATURE (2)..(2): Xaa = Homocysteine whose side chain forms a cystathionine bridge
  MISC_FEATURE (12)..(12): Alanine whose side chain forms a cystathionine bridge
FXIWQDWGEHRAT

SEQ ID NO: 73 - protein, 13 aa, Artificial Sequence
  Compstatin analogue
  MISC_FEATURE (2)..(2): Xaa = Homocysteine whose side chain forms a cystathionine bridge
  MISC_FEATURE (4)..(4): Xaa = 1-Me-Trp
  MISC_FEATURE (8)..(8): Xaa = Sar
  MISC_FEATURE (12)..(12): Alanine whose side chain forms a cystathionine bridge
  MISC_FEATURE (13)..(13): Xaa = N-Me-Ile
IXIXQDWXAHRAX

SEQ ID NO: 74 - protein, 13 aa, Artificial Sequence
  Compstatin analogue
  MISC_FEATURE (2)..(2): Xaa = Homocysteine whose side chain forms a cystathionine bridge
  MISC_FEATURE (4)..(4): Xaa = 1-Me-Trp
  MISC_FEATURE (12)..(12): Alanine whose side chain forms a cystathionine bridge
  MISC_FEATURE (13)..(13): Xaa = Sar
IXIXQDWGEHRAX

SEQ ID NO: 75 - protein, 13 aa, Artificial Sequence
  Compstatin analogue
  MISC_FEATURE (2)..(2): Xaa = Homocysteine whose side chain forms a cystathionine bridge
  MISC_FEATURE (4)..(4): Xaa = 1-Me-Trp
  MISC_FEATURE (12)..(12): Alanine whose side chain forms a cystathionine bridge
IXIXQDWGEHRAT

SEQ ID NO: 76 - protein, 13 aa, Artificial Sequence
  Compstatin analogue
  MISC_FEATURE (2)..(2): Xaa = Homocysteine whose side chain forms a cystathionine bridge
  MISC_FEATURE (4)..(4): Xaa = 2-Nal
  MISC_FEATURE (12)..(12): Alanine whose side chain forms a cystathionine bridge
  MISC_FEATURE (13)..(13): Xaa = Sar
IXIXQDWGEHRAX

SEQ ID NO: 77 - protein, 13 aa, Artificial Sequence
  Compstatin analogue
  MISC_FEATURE (2)..(2): Xaa = Homocysteine whose side chain forms a cystathionine bridge
  MISC_FEATURE (12)..(12): Alanine whose side chain forms a cystathionine bridge
IXIWQDWGAHRAE

SEQ ID NO: 78 - protein, 13 aa, Artificial Sequence
  Compstatin analogue
  MISC_FEATURE (2)..(2): Xaa = Homocysteine whose side chain forms a cystathionine bridge
  MISC_FEATURE (12)..(12): Alanine whose side chain forms a cystathionine bridge
IXIWQDWGAHRAT

SEQ ID NO: 79 - protein, 13 aa, Artificial Sequence
  Compstatin analogue
  MISC_FEATURE (2)..(2): Xaa = Homocysteine whose side chain forms a cystathionine bridge
  MISC_FEATURE (12)..(12): Alanine whose side chain forms a cystathionine bridge
IXIWQDWGAHSAT

SEQ ID NO: 80 - protein, 13 aa, Artificial Sequence
  Compstatin analogue
  MISC_FEATURE (2)..(2): Xaa = Homocysteine whose side chain forms a cystathionine bridge
  MISC_FEATURE (12)..(12): Alanine whose side chain forms a cystathionine bridge
IXIWQDWGDHRAT

SEQ ID NO: 81 - protein, 13 aa, Artificial Sequence
  Compstatin analogue
  MISC_FEATURE (2)..(2): Xaa = Homocysteine whose side chain forms a cystathionine bridge
  MISC_FEATURE (12)..(12): Alanine whose side chain forms a cystathionine bridge
  MISC_FEATURE (13)..(13): Xaa = Sar
IXIWQDWGEHRAX

SEQ ID NO: 82 - protein, 13 aa, Artificial Sequence
  Compstatin analogue
  MISC_FEATURE (2)..(2): Xaa = Homocysteine whose side chain forms a cystathionine bridge
  MISC_FEATURE (12)..(12): Alanine whose side chain forms a cystathionine bridge
IXIWQDWGEHRAE

SEQ ID NO: 83 - protein, 13 aa, Artificial Sequence
  Compstatin analogue
  MISC_FEATURE (2)..(2): Xaa = Homocysteine whose side chain forms a cystathionine bridge
  MISC_FEATURE (12)..(12): Alanine whose side chain forms a cystathionine bridge
IXIWQDWGEHRAS

SEQ ID NO: 84 - protein, 13 aa, Artificial Sequence
  Compstatin analogue
  MISC_FEATURE (2)..(2): Xaa = Homocysteine whose side chain forms a cystathionine bridge
  MISC_FEATURE (12)..(12): Alanine whose side chain forms a cystathionine bridge
IXIWQDWGEHRAT

SEQ ID NO: 85 - protein, 13 aa, Artificial Sequence
  Compstatin analogue
  MISC_FEATURE (2)..(2): Xaa = Homocysteine whose side chain forms a cystathionine bridge
  MISC_FEATURE (12)..(12): Alanine whose side chain forms a cystathionine bridge
IXIWQDWGEHSAT

SEQ ID NO: 86 - protein, 13 aa, Artificial Sequence
  Compstatin analogue
  MISC_FEATURE (2)..(2): Xaa = Homocysteine whose side chain forms a cystathionine bridge
  MISC_FEATURE (12)..(12): Alanine whose side chain forms a cystathionine bridge
IXIWQDWGKHRAT

SEQ ID NO: 87 - protein, 13 aa, Artificial Sequence
  Compstatin analogue
  MISC_FEATURE (2)..(2): Xaa = Homocysteine whose side chain forms a cystathionine bridge
  MISC_FEATURE (12)..(12): Alanine whose side chain forms a cystathionine bridge
IXIWQDWGRHRAT

SEQ ID NO: 88 - protein, 13 aa, Artificial Sequence
  Compstatin analogue
  MISC_FEATURE (2)..(2): Xaa = Homocysteine whose side chain forms a cystathionine bridge
  MISC_FEATURE (12)..(12): Alanine whose side chain forms a cystathionine bridge
IXIWQDWGSHRAT

SEQ ID NO: 89 - protein, 13 aa, Artificial Sequence
  Compstatin analogue
  MISC_FEATURE (2)..(2): Xaa = Homocysteine whose side chain forms a cystathionine bridge
  MISC_FEATURE (12)..(12): Alanine whose side chain forms a cystathionine bridge
IXIWQEWGEHRAT

SEQ ID NO: 90 - protein, 13 aa, Artificial Sequence
  Compstatin analogue
  MISC_FEATURE (2)..(2): Xaa = Homocysteine whose side chain forms a cystathionine bridge
  MISC_FEATURE (12)..(12): Alanine whose side chain forms a cystathionine bridge
IXIWQKWGAHRAT

SEQ ID NO: 91 - protein, 13 aa, Artificial Sequence
  Compstatin analogue
  MISC_FEATURE (2)..(2): Xaa = Homocysteine whose side chain forms a cystathionine bridge
  MISC_FEATURE (12)..(12): Alanine whose side chain forms a cystathionine bridge
IXIWQKWGEHRAT

SEQ ID NO: 92 - protein, 13 aa, Artificial Sequence
  Compstatin analogue
  MISC_FEATURE (2)..(2): Xaa = Homocysteine whose side chain forms a cystathionine bridge
  MISC_FEATURE (4)..(4): Xaa = 1-Me-Trp
  MISC_FEATURE (12)..(12): Alanine whose side chain forms a cystathionine bridge
  MISC_FEATURE (13)..(13): Xaa = Sar
YXIXQDWGEHRAX

SEQ ID NO: 93 - protein, 13 aa, Artificial Sequence
  Compstatin analogue
  MISC_FEATURE (2)..(2): Xaa = Homocysteine whose side chain forms a cystathionine bridge
  MISC_FEATURE (4)..(4): Xaa = 1-Me-Trp
  MISC_FEATURE (12)..(12): Alanine whose side chain forms a cystathionine bridge
YXIXQDWGEHRAT

SEQ ID NO: 94 - protein, 13 aa, Artificial Sequence
  Compstatin analogue
  MISC_FEATURE (2)..(2): Xaa = Homocysteine whose side chain forms a cystathionine bridge
  MISC_FEATURE (4)..(4): Xaa = 1-Me-Trp
  MISC_FEATURE (12)..(12): Alanine whose side chain forms a cystathionine bridge
  MISC_FEATURE (13)..(13): Xaa = Sar
YXIXQEWGEHRAX

SEQ ID NO: 95 - protein, 13 aa, Artificial Sequence
  Compstatin analogue
  MISC_FEATURE (2)..(2): Xaa = Homocysteine whose side chain forms a cystathionine bridge
  MISC_FEATURE (4)..(4): Xaa = 2-Nal
  MISC_FEATURE (12)..(12): Alanine whose side chain forms a cystathionine bridge
YXIXQDWGEHRAT

SEQ ID NO: 96 - protein, 13 aa, Artificial Sequence
  Compstatin analogue
  MISC_FEATURE (2)..(2): Xaa = Homocysteine whose side chain forms a cystathionine bridge
  MISC_FEATURE (12)..(12): Alanine whose side chain forms a cystathionine bridge
YXIWQDWGEHRAT

SEQ ID NO: 97 - protein, 13 aa, Artificial Sequence
  Compstatin analogue
  MISC_FEATURE (2)..(2): Xaa = Homocysteine whose side chain forms a cystathionine bridge
  MISC_FEATURE (4)..(4): Xaa = 1-Me-Trp
  MISC_FEATURE (11)..(11): Xaa = Lys bearing a lipophilic group covalently attached to its side chain
  MISC_FEATURE (12)..(12): Alanine whose side chain forms a cystathionine bridge
  MISC_FEATURE (13)..(13): Xaa = Sar
YXIXQDWGEHXAX

SEQ ID NO: 98 - protein, 13 aa, Artificial Sequence
  Compstatin analogue
  MISC_FEATURE (2)..(2): Xaa = Homocysteine whose side chain forms a cystathionine bridge
  MISC_FEATURE (4)..(4): Xaa = 1-Me-Trp
  MISC_FEATURE (8)..(8): Xaa = Sar
  MISC_FEATURE (12)..(12): Alanine whose side chain forms a cystathionine bridge
  MISC_FEATURE (13)..(13): Xaa = Sar
YXIXQEWXEHRAX

SEQ ID NO: 99 - protein, 13 aa, Artificial Sequence
  compstatin peptide
  MISC_FEATURE (1)..(1): Xaa = Sar
  MISC_FEATURE (2)..(2): Alanine whose side chain forms a cystathionine bridge
  MISC_FEATURE (4)..(4): Xaa = 1-Me-Trp
  MISC_FEATURE (12)..(12): Xaa = Homocysteine whose side chain forms a cystathionine bridge
  MISC_FEATURE (13)..(13): Xaa = Sar
XXIXQDWGEHRAX

SEQ ID NO: 100 - protein, 13 aa, Artificial Sequence
  compstatin analogue
  MISC_FEATURE (1)..(1): Xaa = Sar
  MISC_FEATURE (2)..(2): Alanine whose side chain forms a cystathionine bridge
  MISC_FEATURE (4)..(4): Xaa = 1-Me-Trp
  MISC_FEATURE (12)..(12): Xaa = Homocysteine whose side chain forms a cystathionine bridge
XXIXQDWGEHRAT

SEQ ID NO: 101 - protein, 13 aa, Artificial Sequence
  Compstatin analogue
  MISC_FEATURE (1)..(1): Xaa = Sar
  MISC_FEATURE (2)..(2): Alanine whose side chain forms a cystathionine bridge
  MISC_FEATURE (4)..(4): Xaa = 1-Me-Trp
  MISC_FEATURE (8)..(8): Xaa = Sar
  MISC_FEATURE (12)..(12): Xaa = Homocysteine whose side chain forms a cystathionine bridge
XXIXQEWXEHRAT

SEQ ID NO: 102 - protein, 13 aa, Artificial Sequence
  Compstatin analogue
  MISC_FEATURE (1)..(1): Xaa = Sar
  MISC_FEATURE (2)..(2): Alanine whose side chain forms a cystathionine bridge
  MISC_FEATURE (4)..(4): Xaa = 1-Me-Trp
  MISC_FEATURE (12)..(12): Xaa = Homocysteine whose side chain forms a cystathionine bridge
  MISC_FEATURE (13)..(13): Xaa = Sar
XXIXQEWGEHRAX

SEQ ID NO: 103 - protein, 13 aa, Artificial Sequence
  Compstatin analogue
  MISC_FEATURE (1)..(1): Xaa - Sar
  MISC_FEATURE (2)..(2): Alanine whose side chain forms a cystathionine bridge
  MISC_FEATURE (12)..(12): Xaa = Homocysteine whose side chain forms a cystathionine bridge
XXIWQDWGEHRAT

SEQ ID NO: 104 - protein, 13 aa, Artificial Sequence
  Compstatin analogue
  MISC_FEATURE (2)..(2): Alanine whose side chain forms a cystathionine bridge
  MISC_FEATURE (4)..(4): Xaa = 1-Me-Trp
  MISC_FEATURE (8)..(8): Xaa = Sar
  MISC_FEATURE (12)..(12): Xaa = Homocysteine whose side chain forms a cystathionine bridge
  MISC_FEATURE (13)..(13): Xaa = Sar
FXIXQDWXEHRAX

SEQ ID NO: 105 - protein, 13 aa, Artificial Sequence
  Compstatin analogue
  MISC_FEATURE (2)..(2): Alanine whose side chain forms a cystathionine bridge
  MISC_FEATURE (4)..(4): Xaa = 1-Me-Trp
  MISC_FEATURE (8)..(8): Xaa = Ser
  MISC_FEATURE (12)..(12): Xaa = Homocysteine whose side chain forms a cystathionine bridge
FXIXQDWXEHRAT

SEQ ID NO: 106 - protein, 13 aa, Artificial Sequence
  Compstatin analogue
  MISC_FEATURE (2)..(2): Alanine whose side chain forms a cystathionine bridge
  MISC_FEATURE (4)..(4): Xaa = 1-Me-Trp
  MISC_FEATURE (12)..(12): Xaa = Homocysteine whose side chain forms a cystathionine bridge
  MISC_FEATURE (13)..(13): Xaa = Sar
FXIXQDWGEHKAX

SEQ ID NO: 107 - protein, 13 aa, Artificial Sequence
  Compstatin analogue
  MISC_FEATURE (2)..(2): Alanine whose side chain forms a cystathionine bridge
  MISC_FEATURE (4)..(4): Xaa = 1-Me-Trp
  MISC_FEATURE (12)..(12): Xaa = Homocysteine whose side chain forms a cystathionine bridge
  MISC_FEATURE (13)..(13): Xaa = Sar
FXIXQDWGEHRAX

SEQ ID NO: 108 - protein, 13 aa, Artificial Sequence
  Compstatin analogue
  MISC_FEATURE (2)..(2): Alanine whose side chain forms a cystathionine bridge
  MISC_FEATURE (4)..(4): Xaa = 1-Me-Trp
  MISC_FEATURE (12)..(12): Xaa = Homocysteine whose side chain forms a cystathionine bridge
FXIXQDWGEHRAE

SEQ ID NO: 109 - protein, 13 aa, Artificial Sequence
  Compstatin analogue
  MISC_FEATURE (2)..(2): Alanine whose side chain forms a cystathionine bridge
  MISC_FEATURE (4)..(4): Xaa = 1-Me-Trp
  MISC_FEATURE (12)..(12): Xaa = Homocysteine whose side chain forms a cystathionine bridge
FXIXQDWGEHRAS

SEQ ID NO: 110 - protein, 13 aa, Artificial Sequence
  Compstatin analogue
  MISC_FEATURE (2)..(2): Alanine whose side chain forms a cystathionine bridge
  MISC_FEATURE (4)..(4): Xaa = 1-Me-Trp
  MISC_FEATURE (12)..(12): Xaa = Homocysteine whose side chain forms a cystathionine bridge
FXIXQDWGEHRAT

SEQ ID NO: 111 - protein, 13 aa, Artificial Sequence
  Compstatin analogue
  MISC_FEATURE (2)..(2): Alanine whose side chain forms a cystathionine bridge
  MISC_FEATURE (4)..(4): Xaa = 1-Me-Trp
  MISC_FEATURE (12)..(12): Xaa = Homocysteine whose side chain forms a cystathionine bridge
  MISC_FEATURE (13)..(13): Xaa = Sar
FXIXQEWGEHRAX

SEQ ID NO: 112 - protein, 13 aa, Artificial Sequence
  Compstatin analogue
  MISC_FEATURE (2)..(2): Alanine whose side chain forms a cystathionine bridge
  MISC_FEATURE (4)..(4): Xaa = 1-Nal
  MISC_FEATURE (12)..(12): Xaa = Homocysteine whose side chain forms a cystathionine bridge
FXIXQDWGEHRAT

SEQ ID NO: 113 - protein, 13 aa, Artificial Sequence
  Compstatin analogue
  MISC_FEATURE (2)..(2): Alanine whose side chain forms a cystathionine bridge
  MISC_FEATURE (4)..(4): Xaa = 2-Nal
  MISC_FEATURE (12)..(12): Xaa = Homocysteine whose side chain forms a cystathionine bridge
FXIXQDWGEHRAT

SEQ ID NO: 114 - protein, 13 aa, Artificial Sequence
  Compstatin analogue
  MISC_FEATURE (2)..(2): Alanine whose side chain forms a cystathionine bridge
  MISC_FEATURE (12)..(12): Xaa = Homocysteine whose side chain forms a cystathionine bridge
  MISC_FEATURE (13)..(13): Xaa = sar
FXIWQDWGEHRAX

SEQ ID NO: 115 - protein, 13 aa, Artificial Sequence
  Compstatin analogue
  MISC_FEATURE (2)..(2): Alanine whose side chain forms a cystathionine bridge
  MISC_FEATURE (12)..(12): Xaa = Homocysteine whose side chain forms a cystathionine bridge
FXIWQDWGEHRAT

SEQ ID NO: 116 - protein, 13 aa, Artificial Sequence
  Compstatin analogue
  MISC_FEATURE (2)..(2): Alanine whose side chain forms a cystathionine bridge
  MISC_FEATURE (4)..(4): Xaa = 1-Me-Trp
  MISC_FEATURE (8)..(8): Xaa = Sar
  MISC_FEATURE (12)..(12): Xaa = Homocysteine whose side chain forms a cystathionine bridge
  MISC_FEATURE (13)..(13): Xaa = N-Me-Ile
IXIXQDWXAHRAX

SEQ ID NO: 117 - protein, 13 aa, Artificial Sequence
  Compstatin analogue
  MISC_FEATURE (2)..(2): Alanine whose side chain forms a cystathionine bridge
  MISC_FEATURE (4)..(4): Xaa = 1-Me-Trp
  MISC_FEATURE (12)..(12): Xaa = Homocysteine whose side chain forms a cystathionine bridge
  MISC_FEATURE (13)..(13): Xaa = Sar
IXIXQDWGEHRAX

SEQ ID NO: 118 - protein, 13 aa, Artificial Sequence
  Compstatin analogue
  MISC_FEATURE (2)..(2): Alanine whose side chain forms a cystathionine bridge
  MISC_FEATURE (4)..(4): Xaa = 1-Me-Trp
  MISC_FEATURE (12)..(12): Xaa = Homocysteine whose side chain forms a cystathionine bridge
IXIXQDWGEHRAT

SEQ ID NO: 119 - protein, 13 aa, Artificial Sequence
  Compstatin analogue
  MISC_FEATURE (2)..(2): Alanine whose side chain forms a cystathionine bridge
  MISC_FEATURE (4)..(4): Xaa = 2-Nal
  MISC_FEATURE (12)..(12): Xaa = Homocysteine whose side chain forms a cystathionine bridge
  MISC_FEATURE (13)..(13): Xaa = Sar
IXIXQDWGEHRAX

SEQ ID NO: 120 - protein, 13 aa, Artificial Sequence
  Compstatin analogue
  MISC_FEATURE (2)..(2): Alanine whose side chain forms a cystathionine bridge
  MISC_FEATURE (12)..(12): Xaa = Homocysteine whose side chain forms a cystathionine bridge
IXIWQDWGAHRAE

SEQ ID NO: 121 - protein, 13 aa, Artificial Sequence
  Compstatin analogue
  MISC_FEATURE (2)..(2): Alanine whose side chain forms a cystathionine bridge
  MISC_FEATURE (12)..(12): Xaa = Homocysteine whose side chain forms a cystathionine bridge
IXIWQDWGAHRAT

SEQ ID NO: 122 - protein, 13 aa, Artificial Sequence
  Compstatin analogue
  MISC_FEATURE (2)..(2): Alanine whose side chain forms a cystathionine bridge
  MISC_FEATURE (12)..(12): Xaa = Homocysteine whose side chain forms a cystathionine bridge
IXIWQDWGAHSAT

SEQ ID NO: 123 - protein, 13 aa, Artificial Sequence
  Compstatin analogue
  MISC_FEATURE (2)..(2): Alanine whose side chain forms a cystathionine bridge
  MISC_FEATURE (12)..(12): Xaa = Homocysteine whose side chain forms a cystathionine bridge
IXIWQDWGDHRAT

SEQ ID NO: 124 - protein, 13 aa, Artificial Sequence
  Compstatin analogue
  MISC_FEATURE (2)..(2): Alanine whose side chain forms a cystathionine bridge
  MISC_FEATURE (12)..(12): Xaa = Homocysteine whose side chain forms a cystathionine bridge
  MISC_FEATURE (13)..(13): Xaa = Sar
IXIWQDWGEHRAX

SEQ ID NO: 125 - protein, 13 aa, Artificial Sequence
  Compstatin analogue
  MISC_FEATURE (2)..(2): Alanine whose side chain forms a cystathionine bridge
  MISC_FEATURE (12)..(12): Xaa = Homocysteine whose side chain forms a cystathionine bridge
IXIWQDWGEHRAE

SEQ ID NO: 126 - protein, 13 aa, Artificial Sequence
  Compstatin analogue
  MISC_FEATURE (2)..(2): Alanine whose side chain forms a cystathionine bridge
  MISC_FEATURE (12)..(12): Xaa = Homocysteine whose side chain forms a cystathionine bridge
IXIWQDWGEHRAS

SEQ ID NO: 127 - protein, 13 aa, Artificial Sequence
  Compstatin analogue
  MISC_FEATURE (2)..(2): Alanine whose side chain forms a cystathionine bridge
  MISC_FEATURE (12)..(12): Xaa = Homocysteine whose side chain forms a cystathionine bridge
IXIWQDWGEHRAT

SEQ ID NO: 128 - protein, 13 aa, Artificial Sequence
  Compstatin analogue
  MISC_FEATURE (2)..(2): Alanine whose side chain forms a cystathionine bridge
  MISC_FEATURE (12)..(12): Xaa = Homocysteine whose side chain forms a cystathionine bridge
IXIWQDWGEHSAT

SEQ ID NO: 129 - protein, 13 aa, Artificial Sequence
  Compstatin analogue
  MISC_FEATURE (2)..(2): Alanine whose side chain forms a cystathionine bridge
  MISC_FEATURE (12)..(12): Xaa = Homocysteine whose side chain forms a cystathionine bridge
IXIWQDWGKHRAT

SEQ ID NO: 130 - protein, 13 aa, Artificial Sequence
  Compstatin analogue
  MISC_FEATURE (2)..(2): Alanine whose side chain forms a cystathionine bridge
  MISC_FEATURE (12)..(12): Xaa = Homocysteine whose side chain forms a cystathionine bridge
IXIWQDWGRHRAT

SEQ ID NO: 131 - protein, 13 aa, Artificial Sequence
  Compstatin analogue
  MISC_FEATURE (2)..(2): Alanine whose side chain forms a cystathionine bridge
  MISC_FEATURE (12)..(12): Xaa = Homocysteine whose side chain forms a cystathionine bridge
IXIWQDWGSHRAT

SEQ ID NO: 132 - protein, 13 aa, Artificial Sequence
  Compstatin analogue
  MISC_FEATURE (2)..(2): Alanine whose side chain forms a cystathionine bridge
  MISC_FEATURE (12)..(12): Xaa = Homocysteine whose side chain forms a cystathionine bridge
IXIWQEWGEHRAT

SEQ ID NO: 133 - protein, 13 aa, Artificial Sequence
  Compstatin analogue
  MISC_FEATURE (2)..(2): Alanine whose side chain forms a cystathionine bridge
  MISC_FEATURE (12)..(12): Xaa = Homocysteine whose side chain forms a cystathionine bridge
IXIWQKWGAHRAT

SEQ ID NO: 134 - protein, 13 aa, Artificial Sequence
  Compstatin analogue
  MISC_FEATURE (2)..(2): Alanine whose side chain forms a cystathionine bridge
  MISC_FEATURE (12)..(12): Xaa = Homocysteine whose side chain forms a cystathionine bridge
IXIWQKWGEHRAT

SEQ ID NO: 135 - protein, 13 aa, Artificial Sequence
  Compstatin analogue
  MISC_FEATURE (2)..(2): Alanine whose side chain forms a cystathionine bridge
  MISC_FEATURE (4)..(4): Xaa = 1-Me-Trp
  MISC_FEATURE (12)..(12): Xaa = Homocysteine whose side chain forms a cystathionine bridge
  MISC_FEATURE (13)..(13): Xaa = Sar
YXIXQDWGEHRAX

SEQ ID NO: 136 - protein, 13 aa, Artificial Sequence
  Compstatin analogue
  MISC_FEATURE (2)..(2): Alanine whose side chain forms a cystathionine bridge
  MISC_FEATURE (4)..(4): Xaa = 1-Me-Trp
  MISC_FEATURE (12)..(12): Xaa = Homocysteine whose side chain forms a cystathionine bridge
YXIXQDWGEHRAT

SEQ ID NO: 137 - protein, 13 aa, Artificial Sequence
  Compstatin analogue
  MISC_FEATURE (2)..(2): Alanine whose side chain forms a cystathionine bridge
  MISC_FEATURE (4)..(4): Xaa = 1-Me-Trp
  MISC_FEATURE (12)..(12): Xaa = Homocysteine whose side chain forms a cystathionine bridge
  MISC_FEATURE (13)..(13): Xaa = Sar
YXIXQEWGEHRAX

SEQ ID NO: 138 - protein, 13 aa, Artificial Sequence
  Compstatin analogue
  MISC_FEATURE (2)..(2): Alanine whose side chain forms a cystathionine bridge
  MISC_FEATURE (4)..(4): Xaa = 2-Nal
  MISC_FEATURE (12)..(12): Xaa = Homocysteine whose side chain forms a cystathionine bridge
YXIXQDWGEHRAT

SEQ ID NO: 139 - protein, 13 aa, Artificial Sequence
  Compstatin analogue
  MISC_FEATURE (2)..(2): Alanine whose side chain forms a cystathionine bridge
  MISC_FEATURE (12)..(12): Xaa = Homocysteine whose side chain forms a cystathionine bridge
YXIWQDWGEHRAT

SEQ ID NO: 140 - protein, 13 aa, Artificial Sequence
  Compstatin analogue
  MISC_FEATURE (2)..(2): Alanine whose side chain forms a cystathionine bridge
  MISC_FEATURE (4)..(4): Xaa = 1-Me-Trp
  MISC_FEATURE (11)..(11): Xaa = Lys bearing a lipophilic group covalently attached to its side chain
  MISC_FEATURE (12)..(12): Xaa = Homocysteine whose side chain forms a cystathionine bridge
  MISC_FEATURE (13)..(13): Xaa = Sar
YXIXQDWGEHXAX

SEQ ID NO: 141 - protein, 13 aa, Artificial Sequence
  Compstatin analogue
  MISC_FEATURE (2)..(2): Alanine whose side chain forms a cystathionine bridge
  MISC_FEATURE (4)..(4): Xaa = 1-Me-Trp
  MISC_FEATURE (8)..(8): Xaa = Sar
  MISC_FEATURE (12)..(12): Xaa = Homocysteine whose side chain forms a cystathionine bridge
  MISC_FEATURE (13)..(13): Xaa = Sar
YXIXQEWXEHRAX

SEQ ID NO: 142 - protein, 13 aa, Artificial Sequence
  compstatin analogue
  MISC_FEATURE (1)..(1): Xaa = Sar
  MISC_FEATURE (2)..(12): lanthionine bridge
  MISC_FEATURE (4)..(4): Xaa = 1-Me-Trp
  MISC_FEATURE (13)..(13): Xaa = Sar
XCIXQDWGEHRAX

SEQ ID NO: 143 - protein, 13 aa, Artificial Sequence
  compstatin analogue
  MISC_FEATURE (1)..(1): Xaa = Sar
  MISC_FEATURE (2)..(12): lanthionine bridge
  MISC_FEATURE (4)..(4): Xaa = 1-Me-Trp
XCIXQDWGEHRAT

SEQ ID NO: 144 - protein, 13 aa, Artificial Sequence
  Compstatin analogue
  MISC_FEATURE (1)..(1): Xaa = Sar
  MISC_FEATURE (2)..(12): lanthionine bridge
  MISC_FEATURE (4)..(4): Xaa = 1-Me-Trp
  MISC_FEATURE (8)..(8): Xaa = Sar
XCIXQEWXEHRAT

SEQ ID NO: 145 - protein, 13 aa, Artificial Sequence
  Compstatin analogue
  MISC_FEATURE (1)..(1): Xaa = Sar
  MISC_FEATURE (2)..(12): lanthionine bridge
  MISC_FEATURE (4)..(4): Xaa = 1-Me-Trp
  MISC_FEATURE (13)..(13): Xaa = Sar
XCIXQEWGEHRAX

SEQ ID NO: 146 - protein, 13 aa, Artificial Sequence
  Compstatin analogue
  MISC_FEATURE (1)..(1): Xaa - Sar
  MISC_FEATURE (2)..(12): lanthionine bridge
XCIWQDWGEHRAT

SEQ ID NO: 147 - protein, 13 aa, Artificial Sequence
  Compstatin analogue
  MISC_FEATURE (2)..(12): lanthionine bridge
  MISC_FEATURE (4)..(4): Xaa = 1-Me-Trp
  MISC_FEATURE (8)..(8): Xaa = Sar
  MISC_FEATURE (13)..(13): Xaa = Sar
FCIXQDWXEHRAX

SEQ ID NO: 148 - protein, 13 aa, Artificial Sequence
  Compstatin analogue
  MISC_FEATURE (2)..(12): lanthionine bridge
  MISC_FEATURE (4)..(4): Xaa = 1-Me-Trp
  MISC_FEATURE (8)..(8): Xaa = Ser
FCIXQDWXEHRAT

SEQ ID NO: 149 - protein, 13 aa, Artificial Sequence
  Compstatin analogue
  MISC_FEATURE (2)..(12): lanthionine bridge
  MISC_FEATURE (4)..(4): Xaa = 1-Me-Trp
  MISC_FEATURE (13)..(13): Xaa = Sar
FCIXQDWGEHKAX

SEQ ID NO: 150 - protein, 13 aa, Artificial Sequence
  Compstatin analogue
  MISC_FEATURE (2)..(12): lanthionine bridge
  MISC_FEATURE (4)..(4): Xaa = 1-Me-Trp
  MISC_FEATURE (13)..(13): Xaa = Sar
FCIXQDWGEHRAX

SEQ ID NO: 151 - protein, 13 aa, Artificial Sequence
  Compstatin analogue
  MISC_FEATURE (2)..(12): lanthionine bridge
  MISC_FEATURE (4)..(4): Xaa = 1-Me-Trp
FCIXQDWGEHRAE

SEQ ID NO: 152 - protein, 13 aa, Artificial Sequence
  Compstatin analogue
  MISC_FEATURE (2)..(12): lanthionine bridge
  MISC_FEATURE (4)..(4): Xaa = 1-Me-Trp
FCIXQDWGEHRAS

SEQ ID NO: 153 - protein, 13 aa, Artificial Sequence
  Compstatin analogue
  MISC_FEATURE (2)..(12): lanthionine bridge
  MISC_FEATURE (4)..(4): Xaa = 1-Me-Trp
FCIXQDWGEHRAT

SEQ ID NO: 154 - protein, 13 aa, Artificial Sequence
  Compstatin analogue
  MISC_FEATURE (2)..(12): lanthionine bridge
  MISC_FEATURE (4)..(4): Xaa = 1-Me-Trp
  MISC_FEATURE (13)..(13): Xaa = Sar
FCIXQEWGEHRAX

SEQ ID NO: 155 - protein, 13 aa, Artificial Sequence
  Compstatin analogue
  MISC_FEATURE (2)..(12): lanthionine bridge
  MISC_FEATURE (4)..(4): Xaa = 1-Nal
FCIXQDWGEHRAT

SEQ ID NO: 156 - protein, 13 aa, Artificial Sequence
  Compstatin analogue
  MISC_FEATURE (2)..(12): lanthionine bridge
  MISC_FEATURE (4)..(4): Xaa = 2-Nal
FCIXQDWGEHRAT

SEQ ID NO: 157 - protein, 13 aa, Artificial Sequence
  Compstatin analogue
  MISC_FEATURE (2)..(12): lanthionine bridge
  MISC_FEATURE (13)..(13): Xaa = sar
FCIWQDWGEHRAX

SEQ ID NO: 158 - protein, 13 aa, Artificial Sequence
  Compstatin analogue
  MISC_FEATURE (2)..(12): lanthionine bridge
FCIWQDWGEHRAT

SEQ ID NO: 159 - protein, 13 aa, Artificial Sequence
  Compstatin analogue
  MISC_FEATURE (2)..(12): lanthionine bridge
  MISC_FEATURE (4)..(4): Xaa = 1-Me-Trp
  MISC_FEATURE (8)..(8): Xaa = Sar
  MISC_FEATURE (13)..(13): Xaa = N-Me-Ile
ICIXQDWXAHRAX

SEQ ID NO: 160 - protein, 13 aa, Artificial Sequence
  Compstatin analogue
  MISC_FEATURE (2)..(12): lanthionine bridge
  MISC_FEATURE (4)..(4): Xaa = 1-Me-Trp
  MISC_FEATURE (13)..(13): Xaa = Sar
ICIXQDWGEHRAX

SEQ ID NO: 161 - protein, 13 aa, Artificial Sequence
  Compstatin analogue
  MISC_FEATURE (2)..(12): lanthionine bridge
  MISC_FEATURE (4)..(4): Xaa = 1-Me-Trp
ICIXQDWGEHRAT

SEQ ID NO: 162 - protein, 13 aa, Artificial Sequence
  Compstatin analogue
  MISC_FEATURE (2)..(12): lanthionine bridge
  MISC_FEATURE (4)..(4): Xaa = 2-Nal
  MISC_FEATURE (13)..(13): Xaa = Sar
ICIXQDWGEHRAX

SEQ ID NO: 163 - protein, 13 aa, Artificial Sequence
  Compstatin analogue
  MISC_FEATURE (2)..(12): lanthionine bridge
ICIWQDWGAHRAE

SEQ ID NO: 164 - protein, 13 aa, Artificial Sequence
  Compstatin analogue
  MISC_FEATURE (2)..(12): lanthionine bridge
ICIWQDWGAHRAT

SEQ ID NO: 165 - protein, 13 aa, Artificial Sequence
  Compstatin analogue
  MISC_FEATURE (2)..(12): lanthionine bridge
ICIWQDWGAHSAT

SEQ ID NO: 166 - protein, 13 aa, Artificial Sequence
  Compstatin analogue
  MISC_FEATURE (2)..(12): lanthionine bridge
ICIWQDWGDHRAT

SEQ ID NO: 167 - protein, 13 aa, Artificial Sequence
  Compstatin analogue
  MISC_FEATURE (2)..(12): lanthionine bridge
  MISC_FEATURE (13)..(13): Xaa = Sar
ICIWQDWGEHRAX

SEQ ID NO: 168 - protein, 13 aa, Artificial Sequence
  Compstatin analogue
  MISC_FEATURE (2)..(12): lanthionine bridge
ICIWQDWGEHRAE

SEQ ID NO: 169 - protein, 13 aa, Artificial Sequence
  Compstatin analogue
  MISC_FEATURE (2)..(12): lanthionine bridge
ICIWQDWGEHRAS

SEQ ID NO: 170 - protein, 13 aa, Artificial Sequence
  Compstatin analogue
  MISC_FEATURE (2)..(12): lanthionine bridge
ICIWQDWGEHRAT

SEQ ID NO: 171 - protein, 13 aa, Artificial Sequence
  Compstatin analogue
  MISC_FEATURE (2)..(12): lanthionine bridge
ICIWQDWGEHSAT

SEQ ID NO: 172 - protein, 13 aa, Artificial Sequence
  Compstatin analogue
  MISC_FEATURE (2)..(12): lanthionine bridge
ICIWQDWGKHRAT

SEQ ID NO: 173 - protein, 13 aa, Artificial Sequence
  Compstatin analogue
  MISC_FEATURE (2)..(12): lanthionine bridge
ICIWQDWGRHRAT

SEQ ID NO: 174 - protein, 13 aa, Artificial Sequence
  Compstatin analogue
  MISC_FEATURE (2)..(12): lanthionine bridge
ICIWQDWGSHRAT

SEQ ID NO: 175 - protein, 13 aa, Artificial Sequence
  Compstatin analogue
  MISC_FEATURE (2)..(12): lanthionine bridge
ICIWQEWGEHRAT

SEQ ID NO: 176 - protein, 13 aa, Artificial Sequence
  Compstatin analogue
  MISC_FEATURE (2)..(12): lanthionine bridge
ICIWQKWGAHRAT

SEQ ID NO: 177 - protein, 13 aa, Artificial Sequence
  Compstatin analogue
  MISC_FEATURE (2)..(12): lanthionine bridge
ICIWQKWGEHRAT

SEQ ID NO: 178 - protein, 13 aa, Artificial Sequence
  Compstatin analogue
  MISC_FEATURE (2)..(12): lanthionine bridge
  misc_feature (4)..(4): Xaa = 1-Me-Trp
  MISC_FEATURE (13)..(13): Xaa = Sar
YCIXQDWGEHRAX

SEQ ID NO: 179 - protein, 13 aa, Artificial Sequence
  Compstatin analogue
  MISC_FEATURE (2)..(12): lanthionine bridge
  MISC_FEATURE (4)..(4): Xaa = 1-Me-Trp
YCIXQDWGEHRAT

SEQ ID NO: 180 - protein, 13 aa, Artificial Sequence
  Compstatin analogue
  MISC_FEATURE (2)..(12): lanthionine bridge
  MISC_FEATURE (4)..(4): Xaa = 1-Me-Trp
  MISC_FEATURE (13)..(13): Xaa = Sar
YCIXQEWGEHRAX

SEQ ID NO: 181 - protein, 13 aa, Artificial Sequence
  Compstatin analogue
  MISC_FEATURE (2)..(12): lanthionine bridge
  MISC_FEATURE (4)..(4): Xaa = 2-Nal
YCIXQDWGEHRAT

SEQ ID NO: 182 - protein, 13 aa, Artificial Sequence
  Compstatin analogue
  MISC_FEATURE (2)..(12): lanthionine bridge
YCIWQDWGEHRAT

SEQ ID NO: 183 - protein, 13 aa, Artificial Sequence
  Compstatin analogue
  MISC_FEATURE (2)..(12): lanthionine bridge
  MISC_FEATURE (4)..(4): Xaa = 1-Me-Trp
  MISC_FEATURE (11)..(11): Xaa = Lys bearing a lipophilic group covalently attached to its side chain
  MISC_FEATURE (13)..(13): Xaa = Sar
YCIXQDWGEHXAX

SEQ ID NO: 184 - protein, 13 aa, Artificial Sequence
  Compstatin analogue
  MISC_FEATURE (2)..(12): lanthionine bridge
  MISC_FEATURE (4)..(4): Xaa = 1-Me-Trp
  MISC_FEATURE (8)..(8): Xaa = Sar
  MISC_FEATURE (13)..(13): Xaa = Sar
YCIXQEWXEHRAX

SEQ ID NO: 185 - protein, 4 aa, Artificial Sequence
  N-terminal and/or C-terminal flanking sequence
ESSA

SEQ ID NO: 186 - protein, 4 aa, Artificial Sequence
  N-terminal and/or C-terminal flanking sequence
AKGE

SEQ ID NO: 187 - protein, 4 aa, Artificial Sequence
  N-terminal and/or C-terminal flanking sequence
ASSE

SEQ ID NO: 188 - protein, 4 aa, Artificial Sequence
  N-terminal and/or C-terminal flanking sequence
ASES

SEQ ID NO: 189 - protein, 4 aa, Artificial Sequence
  N-terminal and/or C-terminal flanking sequence
GSAE

SEQ ID NO: 190 - protein, 4 aa, Artificial Sequence
  N-terminal and/or C-terminal flanking sequence
ESSE

SEQ ID NO: 191 - protein, 4 aa, Artificial Sequence
  N-terminal and/or C-terminal flanking sequence
ESGA

SEQ ID NO: 192 - protein, 4 aa, Artificial Sequence
  N-terminal and/or C-terminal flanking sequence
EGSA

SEQ ID NO: 193 - protein, 4 aa, Artificial Sequence
  N-terminal and/or C-terminal flanking sequence
YLEA

SEQ ID NO: 194 - protein, 4 aa, Artificial Sequence
  N-terminal and/or C-terminal flanking sequence
GAES

SEQ ID NO: 195 - protein, 4 aa, Artificial Sequence
  N-terminal and/or C-terminal flanking sequence
EYGS

SEQ ID NO: 196 - protein, 4 aa, Artificial Sequence
  N-terminal and/or C-terminal flanking sequence
EGYA

SEQ ID NO: 197 - protein, 4 aa, Artificial Sequence
  N-terminal and/or C-terminal flanking sequence
EAGS

SEQ ID NO: 198 - protein, 4 aa, Artificial Sequence
  N-terminal and/or C-terminal flanking sequence
EAKS

SEQ ID NO: 199 - protein, 4 aa, Artificial Sequence
  N-terminal and/or C-terminal flanking sequence
EKSA

SEQ ID NO: 200 - protein, 4 aa, Artificial Sequence
  N-terminal and/or C-terminal flanking sequence
EGGS

SEQ ID NO: 201 - protein, 4 aa, Artificial Sequence
  N-terminal and/or C-terminal flanking sequence
EGGA

SEQ ID NO: 202 - protein, 4 aa, Artificial Sequence
  N-terminal and/or C-terminal flanking sequence
ESSG

SEQ ID NO: 203 - protein, 4 aa, Artificial Sequence
  N-terminal and/or C-terminal flanking sequence
ESAG

SEQ ID NO: 204 - protein, 4 aa, Artificial Sequence
  N-terminal and/or C-terminal flanking sequence
GEES

SEQ ID NO: 205 - protein, 4 aa, Artificial Sequence
  N-terminal and/or C-terminal flanking sequence
AEES

SEQ ID NO: 206 - protein, 4 aa, Artificial Sequence
  N-terminal and/or C-terminal flanking sequence
ESEG

SEQ ID NO: 207 - protein, 4 aa, Artificial Sequence
  N-terminal and/or C-terminal flanking sequence
AEGS

SEQ ID NO: 208 - protein, 4 aa, Artificial Sequence
  N-terminal and/or C-terminal flanking sequence
ESGS

SEQ ID NO: 209 - protein, 4 aa, Artificial Sequence
  N-terminal and/or C-terminal flanking sequence
SEGA

SEQ ID NO: 210 - protein, 4 aa, Artificial Sequence
  N-terminal and/or C-terminal flanking sequence
EGEA

SEQ ID NO: 211 - protein, 4 aa, Artificial Sequence
  N-terminal and/or C-terminal flanking sequence
EGSE

SEQ ID NO: 212 - protein, 4 aa, Artificial Sequence
  N-terminal and/or C-terminal flanking sequence
AGSE

SEQ ID NO: 213 - protein, 4 aa, Artificial Sequence
  N-terminal and/or C-terminal flanking sequence
SASE

SEQ ID NO: 214 - protein, 4 aa, Artificial Sequence
  N-terminal and/or C-terminal flanking sequence
EYSE

SEQ ID NO: 215 - protein, 4 aa, Artificial Sequence
  N-terminal and/or C-terminal flanking sequence
KGSA

SEQ ID NO: 216 - protein, 4 aa, Artificial Sequence
  N-terminal and/or C-terminal flanking sequence
ASGE

SEQ ID NO: 217 - protein, 7 aa, Artificial Sequence
  N-terminal and/or C-terminal flanking sequence
EGASGSG

SEQ ID NO: 218 - protein, 6 aa, Artificial Sequence
  N-terminal and/or C-terminal flanking sequence
EGAGSG

SEQ ID NO: 219 - protein, 6 aa, Artificial Sequence
  N-terminal and/or C-terminal flanking sequence
EGASAG

SEQ ID NO: 220 - protein, 6 aa, Artificial Sequence
  N-terminal and/or C-terminal flanking sequence
EGAGAG

SEQ ID NO: 221 - protein, 7 aa, Artificial Sequence
  N-terminal and/or C-terminal flanking sequence
EGESGSG

SEQ ID NO: 222 - protein, 6 aa, Artificial Sequence
  N-terminal and/or C-terminal flanking sequence
EGEGSG

SEQ ID NO: 223 - protein, 6 aa, Artificial Sequence
  N-terminal and/or C-terminal flanking sequence
EGESAG

SEQ ID NO: 224 - protein, 6 aa, Artificial Sequence
  N-terminal and/or C-terminal flanking sequence
EGEGAG

SEQ ID NO: 225 - protein, 5 aa, Artificial Sequence
  N-terminal and/or C-terminal flanking sequence
  MISC_FEATURE (3)..(3): Xaa = gammaGlu
EKXAK

SEQ ID NO: 226 - protein, 5 aa, Artificial Sequence
  N-terminal and/or C-terminal flanking sequence
EGEGG

SEQ ID NO: 227 - protein, 5 aa, Artificial Sequence
  N-terminal and/or C-terminal flanking sequence
EGAGG

SEQ ID NO: 228 - protein, 5 aa, Artificial Sequence
  N-terminal and/or C-terminal flanking sequence
EGESS

SEQ ID NO: 229 - protein, 5 aa, Artificial Sequence
  N-terminal and/or C-terminal flanking sequence
GAESK

SEQ ID NO: 230 - protein, 4 aa, Artificial Sequence
  N-terminal and/or C-terminal flanking sequence
EGAK

SEQ ID NO: 231 - protein, 4 aa, Artificial Sequence
  N-terminal and/or C-terminal flanking sequence
EGEK

SEQ ID NO: 232 - protein, 4 aa, Artificial Sequence
  N-terminal and/or C-terminal flanking sequence
EGKK

SEQ ID NO: 233 - protein, 4 aa, Artificial Sequence
  N-terminal and/or C-terminal flanking sequence
  MISC_FEATURE (3)..(3): Xaa = gammaGlu
EKXK

SEQ ID NO: 234 - protein, 6 aa, Artificial Sequence
  N-terminal and/or C-terminal flanking sequence
  MISC_FEATURE (4)..(5): Xaa = Peg3
EAEXXK

SEQ ID NO: 235 - protein, 6 aa, Artificial Sequence
  N-terminal and/or C-terminal flanking sequence
GESESE

SEQ ID NO: 236 - protein, 6 aa, Artificial Sequence
  N-terminal and/or C-terminal flanking sequence
GAESES

SEQ ID NO: 237 - protein, 6 aa, Artificial Sequence
  N-terminal and/or C-terminal flanking sequence
EGESES

SEQ ID NO: 238 - protein, 7 aa, Artificial Sequence
  N-terminal and/or C-terminal flanking sequence
EGESESK

SEQ ID NO: 239 - protein, 6 aa, Artificial Sequence
  N-terminal and/or C-terminal flanking sequence
  MISC_FEATURE (4)..(4): Xaa = Peg3
EGEXES

SEQ ID NO: 240 - protein, 7 aa, Artificial Sequence
  N-terminal and/or C-terminal flanking sequence
  MISC_FEATURE (4)..(4): Xaa = Peg3
EGEXESK

SEQ ID NO: 241 - protein, 6 aa, Artificial Sequence
  N-terminal and/or C-terminal flanking sequence
  MISC_FEATURE (4)..(4): Xaa =  8-aminooctanoyl
EGEXEK

SEQ ID NO: 242 - protein, 6 aa, Artificial Sequence
  N-terminal and/or C-terminal flanking sequence
EGEGGG

SEQ ID NO: 243 - protein, 7 aa, Artificial Sequence
  N-terminal and/or C-terminal flanking sequence
EGEGGGK

SEQ ID NO: 244 - protein, 6 aa, Artificial Sequence
  N-terminal and/or C-terminal flanking sequence
  MISC_FEATURE (3)..(3): Xaa = gammaGlu
EKXGGG

SEQ ID NO: 245 - protein, 7 aa, Artificial Sequence
  N-terminal and/or C-terminal flanking sequence
  MISC_FEATURE (3)..(3): Xaa = gammaGlu
EKXGGGK

SEQ ID NO: 246 - protein, 5 aa, Artificial Sequence
  N-terminal and/or C-terminal flanking sequence
  MISC_FEATURE (4)..(4): Xaa = 8-aminooctanoyl
EGEXE

SEQ ID NO: 247 - protein, 5 aa, Artificial Sequence
  a sequence linked to the C terminus of the peptide
  MISC_FEATURE (3)..(3): Xaa = gammaGlu
  MISC_FEATURE (5)..(5): Xaa = a lysine residue covalently linked to a lipophilic group via its side chain
EKXAX

SEQ ID NO: 248 - protein, 4 aa, Artificial Sequence
  a sequence linked to the C terminus of the peptide
  MISC_FEATURE (4)..(4): Xaa = a lysine residue covalently linked to a lipophilic group via its side chain
EGKX

SEQ ID NO: 249 - protein, 4 aa, Artificial Sequence
  a sequence linked to the C terminus of the peptide
  MISC_FEATURE (3)..(3): Xaa = gammaGlu
  MISC_FEATURE (4)..(4): Xaa = a lysine residue covalently linked to a lipophilic group via its side chain
EKXX

SEQ ID NO: 250 - protein, 5 aa, Artificial Sequence
  a sequence linked to the C terminus of the peptide
  MISC_FEATURE (4)..(4): Xaa = Peg3
  MISC_FEATURE (5)..(5): Xaa = a lysine residue covalently linked to a lipophilic group via its side chain
EGEXX

SEQ ID NO: 251 - protein, 7 aa, Artificial Sequence
  a sequence linked to the C terminus of the peptide
  MISC_FEATURE (7)..(7): Xaa = a lysine residue covalently linked to a lipophilic group via its side chain
EGESESX

SEQ ID NO: 252 - protein, 7 aa, Artificial Sequence
  a sequence linked to the C terminus of the peptide
  MISC_FEATURE (4)..(4): Xaa = Peg3
  MISC_FEATURE (7)..(7): Xaa = a lysine residue covalently linked to a lipophilic group via its side chain
EGEXESX

SEQ ID NO: 253 - protein, 6 aa, Artificial Sequence
  a sequence linked to the C terminus of the peptide
  MISC_FEATURE (4)..(4): Xaa = 8-aminooctanoyl
  MISC_FEATURE (6)..(6): Xaa = a lysine residue covalently linked to a lipophilic group via its side chain
EGEXEX

SEQ ID NO: 254 - protein, 7 aa, Artificial Sequence
  a sequence linked to the C terminus of the peptide
  MISC_FEATURE (7)..(7): Xaa = a lysine residue covalently linked to a lipophilic group via its side chain
EGEGGGX

SEQ ID NO: 255 - protein, 7 aa, Artificial Sequence
  a sequence linked to the C terminus of the peptide
  MISC_FEATURE (3)..(3): Xaa = gammaGlu
  MISC_FEATURE (7)..(7): Xaa = a lysine residue covalently linked to a lipophilic group via its side chain
EKXGGGX

SEQ ID NO: 256 - protein, 4 aa, Artificial Sequence
  a sequence linked to the C terminus of the peptide
  MISC_FEATURE (3)..(3): Xaa = Peg3
  MISC_FEATURE (4)..(4): Xaa = a lysine residue covalently linked to a lipophilic group via its side chain
EAXX

SEQ ID NO: 257 - protein, 5 aa, Artificial Sequence
  a sequence linked to the C terminus of the peptide
  MISC_FEATURE (5)..(5): Xaa = a lysine residue covalently linked to a lipophilic group via its side chain
GAESX

SEQ ID NO: 258 - protein, 4 aa, Artificial Sequence
  a sequence linked to the C terminus of the peptide
  MISC_FEATURE (4)..(4): Xaa = a lysine residue covalently linked to a lipophilic group via its side chain
EGAX

SEQ ID NO: 259 - protein, 4 aa, Artificial Sequence
  a sequence linked to the C terminus of the peptide
  MISC_FEATURE (4)..(4): Xaa = a lysine residue covalently linked to a lipophilic group via its side chain
EGEX

SEQ ID NO: 260 - protein, 7 aa, Artificial Sequence
  a sequence linked to the C terminus of the peptide
  MISC_FEATURE (7)..(7): Xaa = a lysine residue covalently linked to a lipophilic group via its side chain
GESESEX

SEQ ID NO: 261 - protein, 13 aa, Artificial Sequence
  compstatin analogue
  DISULFID (2)..(12)
ICIWQDWGAHRCT

SEQ ID NO: 262 - protein, 13 aa, Artificial Sequence
  compstatin analogue
  MISC_FEATURE (2)..(12): the peptides at position 2 and 12 form a cystathionine bridge
IAIWQDWGAHRCT

SEQ ID NO: 263 - protein, 27 aa, Artificial Sequence
  compstatin analogue
  DISULFID (2)..(12)
ICVVQDWGHHRCTAGHMANLTSHASAI

SEQ ID NO: 264 - protein, 4 aa, Artificial Sequence
  side chain
  MISC_FEATURE (1)..(1): Xaa = gamma Glu
  MISC_FEATURE (4)..(4): Xaa = gamma Glu
XKGX

SEQ ID NO: 265 - protein, 17 aa, Artificial Sequence
  compstatin analogue
  MISC_FEATURE (6)..(6): Xaa = any amino acid whose side chain is linked by a thioether bond
  MISC_FEATURE (16)..(16): Xaa = any amino acid whose side chain is linked by a thioether bond
ESSAIXIWQDWGEHRXT

SEQ ID NO: 266 - protein, 13 aa, Artificial Sequence
  compstatin analogue
  MISC_FEATURE (2)..(2): Xaa = any amino acid whose side chain is linked by a thioether bond
  MISC_FEATURE (4)..(4): Xaa is 1MeTrp
  MISC_FEATURE (12)..(12): Xaa = any amino acid whose side chain is linked by a thioether bond
IXIXQDWGEHRXT

SEQ ID NO: 267 - protein, 17 aa, Artificial Sequence
  compstatin analogue
  MISC_FEATURE (2)..(2): Xaa = any amino acid whose side chain is linked by a thioether bond
  MISC_FEATURE (12)..(12): Xaa = any amino acid whose side chain is linked by a thioether bond
IXIWQKWGAHRXTGAES

SEQ ID NO: 268 - protein, 17 aa, Artificial Sequence
  compstatin analogue
  MISC_FEATURE (6)..(6): Xaa = any amino acid whose side chain is linked by a thioether bond
  MISC_FEATURE (16)..(16): Xaa = any amino acid whose side chain is linked by a thioether bond
ESSAYXIWQDWGEHRXT

SEQ ID NO: 269 - protein, 21 aa, Artificial Sequence
  compstatin analogue
  MISC_FEATURE (6)..(6): Xaa = any amino acid whose side chain is linked by a thioether bond
  MISC_FEATURE (16)..(16): Xaa = any amino acid whose side chain is linked by a thioether bond
ESSAIXIWQDWGEHRXTGAES

SEQ ID NO: 270 - protein, 17 aa, Artificial Sequence
  compstatin analogue
  MISC_FEATURE (2)..(2): Xaa = any amino acid whose side chain is linked by a thioether bond
  MISC_FEATURE (12)..(12): Xaa = any amino acid whose side chain is linked by a thioether bond
IXIWQDWGEHRXTGAES

SEQ ID NO: 271 - protein, 16 aa, Artificial Sequence
  compstatin analogue
  MISC_FEATURE (2)..(2): Xaa = any amino acid whose side chain is linked by a thioether bond
  MISC_FEATURE (12)..(12): Xaa = any amino acid whose side chain is linked by a thioether bond
IXIWQDWGEHRXTEGE

SEQ ID NO: 272 - protein, 15 aa, Artificial Sequence
  compstatin analogue
  MISC_FEATURE (2)..(2): Xaa = any amino acid whose side chain is linked by a thioether bond
  MISC_FEATURE (12)..(12): Xaa = any amino acid whose side chain is linked by a thioether bond
IXIWQDWGEHRXTEA

SEQ ID NO: 273 - protein, 14 aa, Artificial Sequence
  compstatin analogue
  MISC_FEATURE (2)..(2): Xaa = any amino acid whose side chain is linked by a thioether bond
  MISC_FEATURE (12)..(12): Xaa = any amino acid whose side chain is linked by a thioether bond
IXIWQDWGEHRXTE

SEQ ID NO: 274 - protein, 15 aa, Artificial Sequence
  compstatin analogue
  MISC_FEATURE (2)..(2): Xaa = any amino acid whose side chain is linked by a thioether bond
  MISC_FEATURE (12)..(12): Xaa = any amino acid whose side chain is linked by a thioether bond
IXIWQDWGEHRXEGE

SEQ ID NO: 275 - protein, 18 aa, Artificial Sequence
  compstatin analogue
  MISC_FEATURE (6)..(6): Xaa = any amino acid whose side chain is linked by a thioether bond
  MISC_FEATURE (16)..(16): Xaa = any amino acid whose side chain is linked by a thioether bond
  MISC_FEATURE (17)..(17): Xaa = Sar
EGSAIXIWQDWGEHRXXE

SEQ ID NO: 276 - protein, 17 aa, Artificial Sequence
  compstatin analogue
  MISC_FEATURE (6)..(6): Xaa = any amino acid whose side chain is linked by a thioether bond
  MISC_FEATURE (16)..(16): Xaa = any amino acid whose side chain is linked by a thioether bond
EGSAIXIWQDWGEHRXT

SEQ ID NO: 277 - protein, 16 aa, Artificial Sequence
  compstatin analogue
  MISC_FEATURE (5)..(5): Xaa = any amino acid whose side chain is linked by a thioether bond
  MISC_FEATURE (15)..(15): Xaa = any amino acid whose side chain is linked by a thioether bond
EGEIXIWQDWGEHRXT

SEQ ID NO: 278 - protein, 16 aa, Artificial Sequence
  compstatin analogue
  MISC_FEATURE (5)..(5): Xaa = any amino acid whose side chain is linked by a thioether bond
  MISC_FEATURE (15)..(15): Xaa = any amino acid whose side chain is linked by a thioether bond
ESEIXIWQDWGEHRXT

SEQ ID NO: 279 - protein, 17 aa, Artificial Sequence
  compstatin analogue
  MISC_FEATURE (4)..(4): Xaa = any amino acid whose side chain is linked by a thioether bond
  MISC_FEATURE (14)..(14): Xaa = any amino acid whose side chain is linked by a thioether bond
SEIXIWQDWGEHRXTEA

SEQ ID NO: 280 - protein, 15 aa, Artificial Sequence
  compstatin analogue
  MISC_FEATURE (3)..(3): Xaa = any amino acid whose side chain is linked by a thioether bond
  MISC_FEATURE (13)..(13): Xaa = any amino acid whose side chain is linked by a thioether bond
EIXIWQDWGEHRXTE

SEQ ID NO: 281 - protein, 17 aa, Artificial Sequence
  compstatin analogue
  MISC_FEATURE (3)..(3): Xaa = any amino acid whose side chain is linked by a thioether bond
  MISC_FEATURE (13)..(13): Xaa = any amino acid whose side chain is linked by a thioether bond
EIXIWQDWGEHRXTEGE

SEQ ID NO: 282 - protein, 18 aa, Artificial Sequence
  compstatin analogue
  MISC_FEATURE (5)..(5): Xaa = any amino acid whose side chain is linked by a thioether bond
  MISC_FEATURE (15)..(15): Xaa = any amino acid whose side chain is linked by a thioether bond
EGEIXIWQDWGEHRXEGE

SEQ ID NO: 283 - protein, 18 aa, Artificial Sequence
  compstatin analogue
  MISC_FEATURE (5)..(5): Xaa = any amino acid whose side chain is linked by a thioether bond
  MISC_FEATURE (15)..(15): Xaa = any amino acid whose side chain is linked by a thioether bond
ESEIXIWQDWGEHRXEGE

SEQ ID NO: 284 - protein, 19 aa, Artificial Sequence
  compstatin analogue
  MISC_FEATURE (5)..(5): Xaa = any amino acid whose side chain is linked by a thioether bond
  MISC_FEATURE (15)..(15): Xaa = any amino acid whose side chain is linked by a thioether bond
KEKIXIWQDWGEHRXTEKE

SEQ ID NO: 285 - protein, 19 aa, Artificial Sequence
  compstatin analogue
  MISC_FEATURE (5)..(5): Xaa = any amino acid whose side chain is linked by a thioether bond
  MISC_FEATURE (15)..(15): Xaa = any amino acid whose side chain is linked by a thioether bond
EKGIXIWQDWGEHRXTEKP

SEQ ID NO: 286 - protein, 16 aa, Artificial Sequence
  compstatin analogue
  MISC_FEATURE (2)..(2): Xaa = any amino acid whose side chain is linked by a thioether bond
  MISC_FEATURE (12)..(12): Xaa = any amino acid whose side chain is linked by a thioether bond
IXIWQDWGEHRXTEGK

SEQ ID NO: 287 - protein, 17 aa, Artificial Sequence
  compstatin analogue
  MISC_FEATURE (5)..(5): Xaa = any amino acid whose side chain is linked by a thioether bond
  MISC_FEATURE (15)..(15): Xaa = any amino acid whose side chain is linked by a thioether bond
  MISC_FEATURE (16)..(16): Xaa = Sar
GSAIXIWQDWGEHRXXE

SEQ ID NO: 288 - protein, 16 aa, Artificial Sequence
  compstatin analogue
  MISC_FEATURE (4)..(4): Xaa = any amino acid whose side chain is linked by a thioether bond
  MISC_FEATURE (14)..(14): Xaa = any amino acid whose side chain is linked by a thioether bond
  MISC_FEATURE (15)..(15): Xaa = Sar
SAIXIWQDWGEHRXXE

SEQ ID NO: 289 - protein, 17 aa, Artificial Sequence
  compstatin analogue
  MISC_FEATURE (4)..(4): Xaa = any amino acid whose side chain is linked by a thioether bond
  MISC_FEATURE (14)..(14): Xaa = any amino acid whose side chain is linked by a thioether bond
SAIXIWQDWGEHRXTEG

SEQ ID NO: 290 - protein, 16 aa, Artificial Sequence
  compstatin analogue
  MISC_FEATURE (2)..(2): Xaa = any amino acid whose side chain is linked by a thioether bond
  MISC_FEATURE (12)..(12): Xaa = any amino acid whose side chain is linked by a thioether bond
FXIWQDWGEHRXTGAE

SEQ ID NO: 291 - protein, 20 aa, Artificial Sequence
  compstatin analogue
  MISC_FEATURE (6)..(6): Xaa = any amino acid whose side chain is linked by a thioether bond
  MISC_FEATURE (16)..(16): Xaa = any amino acid whose side chain is linked by a thioether bond
  MISC_FEATURE (17)..(17): Xaa = Sar
EGSAIXIWQDWGEHRXXEGE

SEQ ID NO: 292 - protein, 18 aa, Artificial Sequence
  compstatin analogue
  MISC_FEATURE (6)..(6): Xaa = any amino acid whose side chain is linked by a thioether bond
  MISC_FEATURE (16)..(16): Xaa = any amino acid whose side chain is linked by a thioether bond
  MISC_FEATURE (17)..(17): Xaa = Sar
EGSAFXIWQDWGEHRXXE

SEQ ID NO: 293 - protein, 17 aa, Artificial Sequence
  compstatin analogue
  MISC_FEATURE (6)..(6): Xaa = any amino acid whose side chain is linked by a thioether bond
  MISC_FEATURE (16)..(16): Xaa = any amino acid whose side chain is linked by a thioether bond
ESSAIXIWQDWGAHRXT

SEQ ID NO: 294 - protein, 17 aa, Artificial Sequence
  compstatin analogue
  MISC_FEATURE (2)..(2): Xaa = any amino acid whose side chain is linked by a thioether bond
  MISC_FEATURE (12)..(12): Xaa = any amino acid whose side chain is linked by a thioether bond
IXIWQDWGAHRXTGAES

SEQ ID NO: 295 - protein, 14 aa, Artificial Sequence
  compstatin analogue
  MISC_FEATURE (1)..(1): Xaa = d-tyrosene
  MISC_FEATURE (3)..(3): Xaa = any amino acid whose side chain is linked by a thioether bond
  MISC_FEATURE (5)..(5): Xaa = 1-Me-Trp
  MISC_FEATURE (9)..(9): Xaa = Sar
  MISC_FEATURE (13)..(13): Xaa = any amino acid whose side chain is linked by a thioether bond
  MISC_FEATURE (14)..(14): Xaa = N-Me-Ile
XIXIXQDWXAHRXX

SEQ ID NO: 296 - protein, 18 aa, Artificial Sequence
  compstatin analogue
  MISC_FEATURE (6)..(6): Xaa = any amino acid whose side chain is linked by a thioether bond
  MISC_FEATURE (8)..(8): Xaa = 1-Me-Trp
  MISC_FEATURE (16)..(16): Xaa = any amino acid whose side chain is linked by a thioether bond
  MISC_FEATURE (17)..(17): Xaa = Sar
EGSAIXIXQDWGEHRXXE

SEQ ID NO: 297 - protein, 18 aa, Artificial Sequence
  compstatin analogue
  MISC_FEATURE (6)..(6): Xaa = any amino acid whose side chain is linked by a thioether bond
  MISC_FEATURE (8)..(8): Xaa = 2-Nal
  MISC_FEATURE (16)..(16): Xaa = any amino acid whose side chain is linked by a thioether bond
  MISC_FEATURE (17)..(17): Xaa = Sar
EGSAIXIXQDWGEHRXXE

SEQ ID NO: 298 - protein, 17 aa, Artificial Sequence
  compstatin analogue
  MISC_FEATURE (2)..(2): Xaa = any amino acid whose side chain is linked by a thioether bond
  MISC_FEATURE (4)..(4): Xaa = 1-Me-Trp
  MISC_FEATURE (12)..(12): Xaa = any amino acid whose side chain is linked by a thioether bond
IXIXQDWGEHRXTGAES

SEQ ID NO: 299 - protein, 17 aa, Artificial Sequence
  compstatin analogue
  MISC_FEATURE (2)..(2): Xaa = any amino acid whose side chain is linked by a thioether bond
  MISC_FEATURE (4)..(4): Xaa = 2-Nal
  MISC_FEATURE (12)..(12): Xaa = any amino acid whose side chain is linked by a thioether bond
IXIXQDWGEHRXTGAES

SEQ ID NO: 300 - protein, 18 aa, Artificial Sequence
  compstatin analogue
  MISC_FEATURE (6)..(6): Xaa = any amino acid whose side chain is linked by a thioether bond
  MISC_FEATURE (8)..(8): Xaa = 1-Me-Trp
  MISC_FEATURE (16)..(16): Xaa = any amino acid whose side chain is linked by a thioether bond
  MISC_FEATURE (17)..(17): Xaa = Sar
EGSAFXIXQDWGEHRXXE

SEQ ID NO: 301 - protein, 18 aa, Artificial Sequence
  compstatin analogue
  MISC_FEATURE (6)..(6): Xaa = any amino acid whose side chain is linked by a thioether bond
  MISC_FEATURE (8)..(8): Xaa = 1-Me-Trp
  MISC_FEATURE (16)..(16): Xaa = any amino acid whose side chain is linked by a thioether bond
  MISC_FEATURE (17)..(17): Xaa = Sar
EGSAYXIXQDWGEHRXXE

SEQ ID NO: 302 - protein, 18 aa, Artificial Sequence
  compstatin analogue
  MISC_FEATURE (6)..(6): Xaa = any amino acid whose side chain is linked by a thioether bond
  MISC_FEATURE (16)..(16): Xaa = any amino acid whose side chain is linked by a thioether bond
EGSAIXIWQDWGEHRXTE

SEQ ID NO: 303 - protein, 18 aa, Artificial Sequence
  compstatin analogue
  MISC_FEATURE (6)..(6): Xaa = any amino acid whose side chain is linked by a thioether bond
  MISC_FEATURE (8)..(8): Xaa =  1-Nal
  MISC_FEATURE (16)..(16): Xaa = any amino acid whose side chain is linked by a thioether bond
EGSAFXIXQDWGEHRXTE

SEQ ID NO: 304 - protein, 18 aa, Artificial Sequence
  compstatin analogue
  MISC_FEATURE (6)..(6): Xaa = any amino acid whose side chain is linked by a thioether bond
  MISC_FEATURE (8)..(8): Xaa = 1-Me-Trp
  MISC_FEATURE (16)..(16): Xaa = any amino acid whose side chain is linked by a thioether bond
EGSAFXIXQDWGEHRXTE

SEQ ID NO: 305 - protein, 19 aa, Artificial Sequence
  compstatin analogue
  MISC_FEATURE (6)..(6): Xaa = any amino acid whose side chain is linked by a thioether bond
  MISC_FEATURE (8)..(8): Xaa = 1-Me-Trp
  MISC_FEATURE (16)..(16): Xaa = any amino acid whose side chain is linked by a thioether bond
EGSAFXIXQDWGEHRXEGE

SEQ ID NO: 306 - protein, 18 aa, Artificial Sequence
  compstatin analogue
  MISC_FEATURE (6)..(6): Xaa = any amino acid whose side chain is linked by a thioether bond
  MISC_FEATURE (8)..(8): Xaa = 1-Me-Trp
  MISC_FEATURE (16)..(16): Xaa = any amino acid whose side chain is linked by a thioether bond
EGSAYXIXQDWGEHRXTE

SEQ ID NO: 307 - protein, 18 aa, Artificial Sequence
  compstatin analogue
  MISC_FEATURE (6)..(6): Xaa = any amino acid whose side chain is linked by a thioether bond
  MISC_FEATURE (8)..(8): Xaa = 2-Nal
  MISC_FEATURE (16)..(16): Xaa = any amino acid whose side chain is linked by a thioether bond
EGSAFXIXQDWGEHRXTE

SEQ ID NO: 308 - protein, 17 aa, Artificial Sequence
  compstatin analogue
  MISC_FEATURE (2)..(2): Xaa = any amino acid whose side chain is linked by a thioether bond
  MISC_FEATURE (4)..(4): Xaa = 2-Nal
  MISC_FEATURE (12)..(12): Xaa = any amino acid whose side chain is linked by a thioether bond
FXIXQDWGEHRXTGAES

SEQ ID NO: 309 - protein, 17 aa, Artificial Sequence
  compstatin analogue
  MISC_FEATURE (2)..(2): Xaa = any amino acid whose side chain is linked by a thioether bond
  MISC_FEATURE (4)..(4): Xaa = 1-Me-Trp
  MISC_FEATURE (12)..(12): Xaa = any amino acid whose side chain is linked by a thioether bond
YXIXQDWGEHRXTGAES

SEQ ID NO: 310 - protein, 17 aa, Artificial Sequence
  compstatin analogue
  MISC_FEATURE (2)..(2): Xaa = any amino acid whose side chain is linked by a thioether bond
  MISC_FEATURE (4)..(4): Xaa = 1-Nal
  MISC_FEATURE (12)..(12): Xaa = any amino acid whose side chain is linked by a thioether bond
FXIXQDWGEHRXTGAES

SEQ ID NO: 311 - protein, 17 aa, Artificial Sequence
  compstatin analogue
  MISC_FEATURE (2)..(2): Xaa = any amino acid whose side chain is linked by a thioether bond
  MISC_FEATURE (4)..(4): Xaa = 2-Nal
  MISC_FEATURE (12)..(12): Xaa = any amino acid whose side chain is linked by a thioether bond
FXIXQDWGEHRXTGAES

SEQ ID NO: 312 - protein, 17 aa, Artificial Sequence
  compstatin analogue
  MISC_FEATURE (2)..(2): Xaa = any amino acid whose side chain is linked by a thioether bond
  MISC_FEATURE (4)..(4): Xaa = 2-Nal
  MISC_FEATURE (12)..(12): Xaa = any amino acid whose side chain is linked by a thioether bond
YXIXQDWGEHRXTGAES

SEQ ID NO: 313 - protein, 17 aa, Artificial Sequence
  compstatin analogue
  MISC_FEATURE (2)..(2): Xaa = any amino acid whose side chain is linked by a thioether bond
  MISC_FEATURE (12)..(12): Xaa = any amino acid whose side chain is linked by a thioether bond
YXIWQDWGEHRXTGAES

SEQ ID NO: 314 - protein, 19 aa, Artificial Sequence
  compstatin analogue
  MISC_FEATURE (4)..(4): Xaa = any amino acid whose side chain is linked by a thioether bond
  MISC_FEATURE (6)..(6): Xaa = 2-Me-Trp
  MISC_FEATURE (14)..(14): Xaa = any amino acid whose side chain is linked by a thioether bond
SEFXIXQDWGEHRXTGAES

SEQ ID NO: 315 - protein, 17 aa, Artificial Sequence
  compstatin analogue
  MISC_FEATURE (2)..(2): Xaa = any amino acid whose side chain is linked by a thioether bond
  MISC_FEATURE (4)..(4): Xaa = 1-Me-Trp
  MISC_FEATURE (12)..(12): Xaa = any amino acid whose side chain is linked by a thioether bond
YXIXQDWGEHRXTEAGS

SEQ ID NO: 316 - protein, 17 aa, Artificial Sequence
  compstatin analogue
  MISC_FEATURE (2)..(2): Xaa = any amino acid whose side chain is linked by a thioether bond
  MISC_FEATURE (4)..(4): Xaa = 1-Me-Trp
  MISC_FEATURE (12)..(12): Xaa = any amino acid whose side chain is linked by a thioether bond
YXIXQDWGEHRXTESGA

SEQ ID NO: 317 - protein, 18 aa, Artificial Sequence
  compstatin analogue
  MISC_FEATURE (6)..(6): Xaa = any amino acid whose side chain is linked by a thioether bond
  MISC_FEATURE (8)..(8): Xaa = 1-Me-Trp
  MISC_FEATURE (16)..(16): Xaa = any amino acid whose side chain is linked by a thioether bond
  MISC_FEATURE (17)..(17): Xaa = Sar
EGSAYXIXQEWGEHRXXE

SEQ ID NO: 318 - protein, 17 aa, Artificial Sequence
  compstatin analogue
  MISC_FEATURE (4)..(4): Xaa = any amino acid whose side chain is linked by a thioether bond
  MISC_FEATURE (6)..(6): Xaa = 1-Me-Trp
  MISC_FEATURE (14)..(14): Xaa = any amino acid whose side chain is linked by a thioether bond
  MISC_FEATURE (15)..(15): Xaa = Sar
SEYXIXQDWGEHRXXEA

SEQ ID NO: 319 - protein, 17 aa, Artificial Sequence
  compstatin analogue
  MISC_FEATURE (2)..(2): Xaa = any amino acid whose side chain is linked by a thioether bond
  MISC_FEATURE (4)..(4): Xaa = 1-Me-Trp
  MISC_FEATURE (8)..(8): Xaa = Sar
  MISC_FEATURE (12)..(12): Xaa = any amino acid whose side chain is linked by a thioether bond
FXIXQDWXEHRXTGAES

SEQ ID NO: 320 - protein, 18 aa, Artificial Sequence
  compstatin analogue
  MISC_FEATURE (1)..(1): Xaa = d-Tyrosene
  MISC_FEATURE (3)..(3): Xaa = any amino acid whose side chain is linked by a thioether bond
  MISC_FEATURE (5)..(5): Xaa = 1-Me-Trp
  MISC_FEATURE (9)..(9): Xaa = Sar
  MISC_FEATURE (13)..(13): Xaa = any amino acid whose side chain is linked by a thioether bond
XFXIXQDWXEHRXTGAES

SEQ ID NO: 321 - protein, 19 aa, Artificial Sequence
  compstatin analogue
  MISC_FEATURE (4)..(4): Xaa = any amino acid whose side chain is linked by a thioether bond
  MISC_FEATURE (6)..(6): Xaa = 1-Me-Trp
  MISC_FEATURE (14)..(14): Xaa = any amino acid whose side chain is linked by a thioether bond
  MISC_FEATURE (15)..(15): Xaa = Sar
SEFXIXQDWGEHRXXGAES

SEQ ID NO: 322 - protein, 17 aa, Artificial Sequence
  compstatin analogue
  MISC_FEATURE (4)..(4): Xaa = any amino acid whose side chain is linked by a thioether bond
  MISC_FEATURE (6)..(6): Xaa = 1-Me-Trp
  MISC_FEATURE (14)..(14): Xaa = any amino acid whose side chain is linked by a thioether bond
  MISC_FEATURE (15)..(15): Xaa = Sar
SEFXIXQDWGEHRXXEA

SEQ ID NO: 323 - protein, 17 aa, Artificial Sequence
  compstatin analogue
  MISC_FEATURE (4)..(4): Xaa = any amino acid whose side chain is linked by a thioether bond
  MISC_FEATURE (6)..(6): Xaa = 1-Me-Trp
  MISC_FEATURE (10)..(10): Xaa = Sar
  MISC_FEATURE (14)..(14): Xaa = any amino acid whose side chain is linked by a thioether bond
  MISC_FEATURE (15)..(15): Xaa = Sar
SEFXIXQDWXEHRXXEA

SEQ ID NO: 324 - protein, 17 aa, Artificial Sequence
  compstatin analogue
  MISC_FEATURE (4)..(4): Xaa = any amino acid whose side chain is linked by a thioether bond
  MISC_FEATURE (6)..(6): Xaa = 1-Me-Trp
  MISC_FEATURE (10)..(10): Xaa = Sar
  MISC_FEATURE (14)..(14): Xaa = any amino acid whose side chain is linked by a thioether bond
SEFXIXQDWXEHRXTEA

SEQ ID NO: 325 - protein, 16 aa, Artificial Sequence
  compstatin analogue
  MISC_FEATURE (4)..(4): Xaa = any amino acid whose side chain is linked by a thioether bond
  MISC_FEATURE (6)..(6): Xaa = 1-Me-Trp
  MISC_FEATURE (14)..(14): Xaa = any amino acid whose side chain is linked by a thioether bond
  MISC_FEATURE (15)..(15): Xaa = Sar
SEFXIXQDWGEHRXXE

SEQ ID NO: 326 - protein, 16 aa, Artificial Sequence
  compstatin analogue
  MISC_FEATURE (4)..(4): Xaa = any amino acid whose side chain is linked by a thioether bond
  MISC_FEATURE (6)..(6): Xaa = 1-Me-Trp
  MISC_FEATURE (10)..(10): Xaa = Sar
  MISC_FEATURE (14)..(14): Xaa = any amino acid whose side chain is linked by a thioether bond
  MISC_FEATURE (15)..(15): Xaa = Sar
SEFXIXQDWXEHRXXE

SEQ ID NO: 327 - protein, 16 aa, Artificial Sequence
  compstatin analogue
  MISC_FEATURE (3)..(3): Xaa = any amino acid whose side chain is linked by a thioether bond
  MISC_FEATURE (5)..(5): Xaa = 1-Me-Trp
  MISC_FEATURE (13)..(13): Xaa = any amino acid whose side chain is linked by a thioether bond
  MISC_FEATURE (14)..(14): Xaa = Sar
EFXIXQDWGEHRXXEA

SEQ ID NO: 328 - protein, 17 aa, Artificial Sequence
  compstatin analogue
  MISC_FEATURE (3)..(3): Xaa = Sar
  MISC_FEATURE (4)..(4): Xaa = any amino acid whose side chain is linked by a thioether bond
  MISC_FEATURE (6)..(6): Xaa = 1-Me-Trp
  MISC_FEATURE (14)..(14): Xaa = any amino acid whose side chain is linked by a thioether bond
  MISC_FEATURE (15)..(15): Xaa = Sar
SEXXIXQDWGEHRXXEA

SEQ ID NO: 329 - protein, 17 aa, Artificial Sequence
  compstatin analogue
  MISC_FEATURE (3)..(3): Xaa = Sar
  MISC_FEATURE (4)..(4): Xaa = any amino acid whose side chain is linked by a thioether bond
  MISC_FEATURE (6)..(6): Xaa = 1-Me-Trp
  MISC_FEATURE (14)..(14): Xaa = any amino acid whose side chain is linked by a thioether bond
SEXXIXQDWGEHRXTEA

SEQ ID NO: 330 - protein, 17 aa, Artificial Sequence
  compstatin analogue
  MISC_FEATURE (4)..(4): Xaa = any amino acid whose side chain is linked by a thioether bond
  MISC_FEATURE (6)..(6): Xaa = 1-Me-Trp
  MISC_FEATURE (14)..(14): Xaa = any amino acid whose side chain is linked by a thioether bond
  MISC_FEATURE (15)..(15): Xaa = Sar
SEFXIXQEWGEHRXXEA

SEQ ID NO: 331 - protein, 17 aa, Artificial Sequence
  compstatin analogue
  MISC_FEATURE (4)..(4): Xaa = any amino acid whose side chain is linked by a thioether bond
  MISC_FEATURE (6)..(6): Xaa = 1-Me-Trp
  MISC_FEATURE (14)..(14): Xaa = any amino acid whose side chain is linked by a thioether bond
SEFXIXQDWGEHRXSEA

SEQ ID NO: 332 - protein, 15 aa, Artificial Sequence
  compstatin analogue
  MISC_FEATURE (3)..(3): Xaa = any amino acid whose side chain is linked by a thioether bond
  MISC_FEATURE (5)..(5): Xaa = 1-Me-Trp
  MISC_FEATURE (13)..(13): Xaa = any amino acid whose side chain is linked by a thioether bond
EFXIXQDWGEHRXES

SEQ ID NO: 333 - protein, 17 aa, Artificial Sequence
  compstatin analogue
  MISC_FEATURE (4)..(4): Xaa = any amino acid whose side chain is linked by a thioether bond
  MISC_FEATURE (6)..(6): Xaa = 1-Me-Trp
  MISC_FEATURE (14)..(14): Xaa = any amino acid whose side chain is linked by a thioether bond
  MISC_FEATURE (15)..(15): Xaa = Sar
SEFXIXQDWGEHKXXEA

SEQ ID NO: 334 - protein, 17 aa, Artificial Sequence
  compstatin analogue
  MISC_FEATURE (4)..(4): Xaa = any amino acid whose side chain is linked by a thioether bond
  MISC_FEATURE (6)..(6): Xaa = 1-Me-Trp
  MISC_FEATURE (14)..(14): Xaa = any amino acid whose side chain is linked by a thioether bond
  MISC_FEATURE (15)..(15): Xaa = Sar
GEFXIXQDWGEHRXXEA

SEQ ID NO: 335 - protein, 17 aa, Artificial Sequence
  compstatin analogue
  MISC_FEATURE (3)..(3): Xaa = Sar
  MISC_FEATURE (4)..(4): Xaa = any amino acid whose side chain is linked by a thioether bond
  MISC_FEATURE (6)..(6): Xaa = 1-Me-Trp
  MISC_FEATURE (14)..(14): Xaa = any amino acid whose side chain is linked by a thioether bond
GEXXIXQDWGEHRXTEA

SEQ ID NO: 336 - protein, 17 aa, Artificial Sequence
  compstatin analogue
  MISC_FEATURE (3)..(3): Xaa = Sar
  MISC_FEATURE (4)..(4): Xaa = any amino acid whose side chain is linked by a thioether bond
  MISC_FEATURE (6)..(6): Xaa = 1-Me-Trp
  MISC_FEATURE (10)..(10): Xaa = Sar
  MISC_FEATURE (14)..(14): Xaa = any amino acid whose side chain is linked by a thioether bond
SEXXIXQEWXEHRXTEA

SEQ ID NO: 337 - protein, 17 aa, Artificial Sequence
  compstatin analogue
  MISC_FEATURE (3)..(3): Xaa = Sar
  MISC_FEATURE (4)..(4): Xaa = any amino acid whose side chain is linked by a thioether bond
  MISC_FEATURE (6)..(6): Xaa = 1-Me-Trp
  MISC_FEATURE (14)..(14): Xaa = any amino acid whose side chain is linked by a thioether bond
  MISC_FEATURE (15)..(15): Xaa = Sar
SEXXIXQEWGEHRXXEA

SEQ ID NO: 338 - protein, 16 aa, Artificial Sequence
  compstatin analogue
  MISC_FEATURE (1)..(1): Xaa = d-tyrosene
  MISC_FEATURE (2)..(2): Xaa = Sar
  MISC_FEATURE (3)..(3): Xaa = any amino acid whose side chain is linked by a thioether bond
  MISC_FEATURE (5)..(5): Xaa = 1-Me-Trp
  MISC_FEATURE (13)..(13): Xaa = any amino acid whose side chain is linked by a thioether bond
XXXIXQDWGEHRXTEA

SEQ ID NO: 339 - protein, 17 aa, Artificial Sequence
  compstatin analogue
  MISC_FEATURE (6)..(6): Xaa = homocysteine whose side chain forms a cystathionine bridge
  MISC_FEATURE (16)..(16): Ala whose side chain forms a cystathionine bridge
ESSAIXIWQDWGEHRAT

SEQ ID NO: 340 - protein, 13 aa, Artificial Sequence
  compstatin analogue
  MISC_FEATURE (2)..(2): Xaa = homocysteine whose side chain forms a cystathionine bridge
  MISC_FEATURE (4)..(4): Xaa is 1MeTrp
  MISC_FEATURE (12)..(12): Ala whose side chain forms a cystathionine bridge
IXIXQDWGEHRAT

SEQ ID NO: 341 - protein, 17 aa, Artificial Sequence
  compstatin analogue
  MISC_FEATURE (2)..(2): Xaa = homocysteine whose side chain forms a cystathionine bridge
  MISC_FEATURE (12)..(12): Ala whose side chain forms a cystathionine bridge
IXIWQKWGAHRATGAES

SEQ ID NO: 342 - protein, 17 aa, Artificial Sequence
  compstatin analogue
  MISC_FEATURE (6)..(6): Xaa = homocysteine whose side chain forms a cystathionine bridge
  MISC_FEATURE (16)..(16): Ala whose side chain forms a cystathionine bridge
ESSAYXIWQDWGEHRAT

SEQ ID NO: 343 - protein, 21 aa, Artificial Sequence
  compstatin analogue
  MISC_FEATURE (6)..(6): Xaa = homocysteine whose side chain forms a cystathionine bridge
  MISC_FEATURE (16)..(16): Ala whose side chain forms a cystathionine bridge
ESSAIXIWQDWGEHRATGAES

SEQ ID NO: 344 - protein, 17 aa, Artificial Sequence
  compstatin analogue
  MISC_FEATURE (2)..(2): Xaa = homocysteine whose side chain forms a cystathionine bridge
  MISC_FEATURE (12)..(12): Ala whose side chain forms a cystathionine bridge
IXIWQDWGEHRATGAES

SEQ ID NO: 345 - protein, 16 aa, Artificial Sequence
  compstatin analogue
  MISC_FEATURE (2)..(2): Xaa = homocysteine whose side chain forms a cystathionine bridge
  MISC_FEATURE (12)..(12): Ala whose side chain forms a cystathionine bridge
IXIWQDWGEHRATEGE

SEQ ID NO: 346 - protein, 15 aa, Artificial Sequence
  compstatin analogue
  MISC_FEATURE (2)..(2): Xaa = homocysteine whose side chain forms a cystathionine bridge
  MISC_FEATURE (12)..(12): Ala whose side chain forms a cystathionine bridge
IXIWQDWGEHRATEA

SEQ ID NO: 347 - protein, 14 aa, Artificial Sequence
  compstatin analogue
  MISC_FEATURE (2)..(2): Xaa = homocysteine whose side chain forms a cystathionine bridge
  MISC_FEATURE (12)..(12): Ala whose side chain forms a cystathionine bridge
IXIWQDWGEHRATE

SEQ ID NO: 348 - protein, 15 aa, Artificial Sequence
  compstatin analogue
  MISC_FEATURE (2)..(2): Xaa = homocysteine whose side chain forms a cystathionine bridge
  MISC_FEATURE (12)..(12): Ala whose side chain forms a cystathionine bridge
IXIWQDWGEHRAEGE

SEQ ID NO: 349 - protein, 18 aa, Artificial Sequence
  compstatin analogue
  MISC_FEATURE (6)..(6): Xaa = homocysteine whose side chain forms a cystathionine bridge
  MISC_FEATURE (16)..(16): Ala whose side chain forms a cystathionine bridge
  MISC_FEATURE (17)..(17): Xaa = Sar
EGSAIXIWQDWGEHRAXE

SEQ ID NO: 350 - protein, 17 aa, Artificial Sequence
  compstatin analogue
  MISC_FEATURE (6)..(6): Xaa = homocysteine whose side chain forms a cystathionine bridge
  MISC_FEATURE (16)..(16): Ala whose side chain forms a cystathionine bridge
EGSAIXIWQDWGEHRAT

SEQ ID NO: 351 - protein, 16 aa, Artificial Sequence
  compstatin analogue
  MISC_FEATURE (5)..(5): Xaa = homocysteine whose side chain forms a cystathionine bridge
  MISC_FEATURE (15)..(15): Ala whose side chain forms a cystathionine bridge
EGEIXIWQDWGEHRAT

SEQ ID NO: 352 - protein, 16 aa, Artificial Sequence
  compstatin analogue
  MISC_FEATURE (5)..(5): Xaa = homocysteine whose side chain forms a cystathionine bridge
  MISC_FEATURE (15)..(15): Ala whose side chain forms a cystathionine bridge
ESEIXIWQDWGEHRAT

SEQ ID NO: 353 - protein, 17 aa, Artificial Sequence
  compstatin analogue
  MISC_FEATURE (4)..(4): Xaa = homocysteine whose side chain forms a cystathionine bridge
  MISC_FEATURE (14)..(14): Ala whose side chain forms a cystathionine bridge
SEIXIWQDWGEHRATEA

SEQ ID NO: 354 - protein, 15 aa, Artificial Sequence
  compstatin analogue
  MISC_FEATURE (3)..(3): Xaa = homocysteine whose side chain forms a cystathionine bridge
  MISC_FEATURE (13)..(13): Ala whose side chain forms a cystathionine bridge
EIXIWQDWGEHRATE

SEQ ID NO: 355 - protein, 17 aa, Artificial Sequence
  compstatin analogue
  MISC_FEATURE (3)..(3): Xaa = homocysteine whose side chain forms a cystathionine bridge
  MISC_FEATURE (13)..(13): Ala whose side chain forms a cystathionine bridge
EIXIWQDWGEHRATEGE

SEQ ID NO: 356 - protein, 18 aa, Artificial Sequence
  compstatin analogue
  MISC_FEATURE (5)..(5): Xaa = homocysteine whose side chain forms a cystathionine bridge
  MISC_FEATURE (15)..(15): Ala whose side chain forms a cystathionine bridge
EGEIXIWQDWGEHRAEGE

SEQ ID NO: 357 - protein, 18 aa, Artificial Sequence
  compstatin analogue
  MISC_FEATURE (5)..(5): Xaa = homocysteine whose side chain forms a cystathionine bridge
  MISC_FEATURE (15)..(15): Ala whose side chain forms a cystathionine bridge
ESEIXIWQDWGEHRAEGE

SEQ ID NO: 358 - protein, 19 aa, Artificial Sequence
  compstatin analogue
  MISC_FEATURE (5)..(5): Xaa = homocysteine whose side chain forms a cystathionine bridge
  MISC_FEATURE (15)..(15): Ala whose side chain forms a cystathionine bridge
KEKIXIWQDWGEHRATEKE

SEQ ID NO: 359 - protein, 19 aa, Artificial Sequence
  compstatin analogue
  MISC_FEATURE (5)..(5): Xaa = homocysteine whose side chain forms a cystathionine bridge
  MISC_FEATURE (15)..(15): Ala whose side chain forms a cystathionine bridge
EKGIXIWQDWGEHRATEKP

SEQ ID NO: 360 - protein, 16 aa, Artificial Sequence
  compstatin analogue
  MISC_FEATURE (2)..(2): Xaa = homocysteine whose side chain forms a cystathionine bridge
  MISC_FEATURE (12)..(12): Ala whose side chain forms a cystathionine bridge
IXIWQDWGEHRATEGK

SEQ ID NO: 361 - protein, 17 aa, Artificial Sequence
  compstatin analogue
  MISC_FEATURE (5)..(5): Xaa = homocysteine whose side chain forms a cystathionine bridge
  MISC_FEATURE (15)..(15): Ala whose side chain forms a cystathionine bridge
  MISC_FEATURE (16)..(16): Xaa = Sar
GSAIXIWQDWGEHRAXE

SEQ ID NO: 362 - protein, 16 aa, Artificial Sequence
  compstatin analogue
  MISC_FEATURE (4)..(4): Xaa = homocysteine whose side chain forms a cystathionine bridge
  MISC_FEATURE (14)..(14): Ala whose side chain forms a cystathionine bridge
  MISC_FEATURE (15)..(15): Xaa = Sar
SAIXIWQDWGEHRAXE

SEQ ID NO: 363 - protein, 17 aa, Artificial Sequence
  compstatin analogue
  MISC_FEATURE (4)..(4): Xaa = homocysteine whose side chain forms a cystathionine bridge
  MISC_FEATURE (14)..(14): Ala whose side chain forms a cystathionine bridge
SAIXIWQDWGEHRATEG

SEQ ID NO: 364 - protein, 16 aa, Artificial Sequence
  compstatin analogue
  MISC_FEATURE (2)..(2): Xaa = homocysteine whose side chain forms a cystathionine bridge
  MISC_FEATURE (12)..(12): Ala whose side chain forms a cystathionine bridge
FXIWQDWGEHRATGAE

SEQ ID NO: 365 - protein, 20 aa, Artificial Sequence
  compstatin analogue
  MISC_FEATURE (6)..(6): Xaa = homocysteine whose side chain forms a cystathionine bridge
  MISC_FEATURE (16)..(16): Ala whose side chain forms a cystathionine bridge
  MISC_FEATURE (17)..(17): Xaa = Sar
EGSAIXIWQDWGEHRAXEGE

SEQ ID NO: 366 - protein, 18 aa, Artificial Sequence
  compstatin analogue
  MISC_FEATURE (6)..(6): Xaa = homocysteine whose side chain forms a cystathionine bridge
  MISC_FEATURE (16)..(16): Ala whose side chain forms a cystathionine bridge
  MISC_FEATURE (17)..(17): Xaa = Sar
EGSAFXIWQDWGEHRAXE

SEQ ID NO: 367 - protein, 17 aa, Artificial Sequence
  compstatin analogue
  MISC_FEATURE (6)..(6): Xaa = homocysteine whose side chain forms a cystathionine bridge
  MISC_FEATURE (16)..(16): Ala whose side chain forms a cystathionine bridge
ESSAIXIWQDWGAHRAT

SEQ ID NO: 368 - protein, 17 aa, Artificial Sequence
  compstatin analogue
  MISC_FEATURE (2)..(2): Xaa = homocysteine whose side chain forms a cystathionine bridge
  MISC_FEATURE (12)..(12): Ala whose side chain forms a cystathionine bridge
IXIWQDWGAHRATGAES

SEQ ID NO: 369 - protein, 14 aa, Artificial Sequence
  compstatin analogue
  MISC_FEATURE (1)..(1): Xaa = d-tyrosene
  MISC_FEATURE (3)..(3): Xaa = homocysteine whose side chain forms a cystathionine bridge
  MISC_FEATURE (5)..(5): Xaa = 1-Me-Trp
  MISC_FEATURE (9)..(9): Xaa = Sar
  MISC_FEATURE (13)..(13): Ala whose side chain forms a cystathionine bridge
  MISC_FEATURE (14)..(14): Xaa = N-Me-Ile
XIXIXQDWXAHRAX

SEQ ID NO: 370 - protein, 18 aa, Artificial Sequence
  compstatin analogue
  MISC_FEATURE (6)..(6): Xaa = homocysteine whose side chain forms a cystathionine bridge
  MISC_FEATURE (8)..(8): Xaa = 1-Me-Trp
  MISC_FEATURE (16)..(16): Ala whose side chain forms a cystathionine bridge
  MISC_FEATURE (17)..(17): Xaa = Sar
EGSAIXIXQDWGEHRAXE

SEQ ID NO: 371 - protein, 18 aa, Artificial Sequence
  compstatin analogue
  MISC_FEATURE (6)..(6): Xaa = homocysteine whose side chain forms a cystathionine bridge
  MISC_FEATURE (8)..(8): Xaa = 2-Nal
  MISC_FEATURE (16)..(16): Ala whose side chain forms a cystathionine bridge
  MISC_FEATURE (17)..(17): Xaa = Sar
EGSAIXIXQDWGEHRAXE

SEQ ID NO: 372 - protein, 17 aa, Artificial Sequence
  compstatin analogue
  MISC_FEATURE (2)..(2): Xaa = homocysteine whose side chain forms a cystathionine bridge
  MISC_FEATURE (4)..(4): Xaa = 1-Me-Trp
  MISC_FEATURE (12)..(12): Ala whose side chain forms a cystathionine bridge
IXIXQDWGEHRATGAES

SEQ ID NO: 373 - protein, 17 aa, Artificial Sequence
  compstatin analogue
  MISC_FEATURE (2)..(2): Xaa = homocysteine whose side chain forms a cystathionine bridge
  MISC_FEATURE (4)..(4): Xaa = 2-Nal
  MISC_FEATURE (12)..(12): Ala whose side chain forms a cystathionine bridge
IXIXQDWGEHRATGAES

SEQ ID NO: 374 - protein, 18 aa, Artificial Sequence
  compstatin analogue
  MISC_FEATURE (6)..(6): Xaa = homocysteine whose side chain forms a cystathionine bridge
  MISC_FEATURE (8)..(8): Xaa = 1-Me-Trp
  MISC_FEATURE (16)..(16): Ala whose side chain forms a cystathionine bridge
  MISC_FEATURE (17)..(17): Xaa = Sar
EGSAFXIXQDWGEHRAXE

SEQ ID NO: 375 - protein, 18 aa, Artificial Sequence
  compstatin analogue
  MISC_FEATURE (6)..(6): Xaa = homocysteine whose side chain forms a cystathionine bridge
  MISC_FEATURE (8)..(8): Xaa = 1-Me-Trp
  MISC_FEATURE (16)..(16): Ala whose side chain forms a cystathionine bridge
  MISC_FEATURE (17)..(17): Xaa = Sar
EGSAYXIXQDWGEHRAXE

SEQ ID NO: 376 - protein, 18 aa, Artificial Sequence
  compstatin analogue
  MISC_FEATURE (6)..(6): Xaa = homocysteine whose side chain forms a cystathionine bridge
  MISC_FEATURE (16)..(16): Ala whose side chain forms a cystathionine bridge
EGSAIXIWQDWGEHRATE

SEQ ID NO: 377 - protein, 18 aa, Artificial Sequence
  compstatin analogue
  MISC_FEATURE (6)..(6): Xaa = homocysteine whose side chain forms a cystathionine bridge
  MISC_FEATURE (8)..(8): Xaa =  1-Nal
  MISC_FEATURE (16)..(16): Ala whose side chain forms a cystathionine bridge
EGSAFXIXQDWGEHRATE

SEQ ID NO: 378 - protein, 18 aa, Artificial Sequence
  compstatin analogue
  MISC_FEATURE (6)..(6): Xaa = homocysteine whose side chain forms a cystathionine bridge
  MISC_FEATURE (8)..(8): Xaa = 1-Me-Trp
  MISC_FEATURE (16)..(16): Ala whose side chain forms a cystathionine bridge
EGSAFXIXQDWGEHRATE

SEQ ID NO: 379 - protein, 19 aa, Artificial Sequence
  compstatin analogue
  MISC_FEATURE (6)..(6): Xaa = homocysteine whose side chain forms a cystathionine bridge
  MISC_FEATURE (8)..(8): Xaa = 1-Me-Trp
  MISC_FEATURE (16)..(16): Ala whose side chain forms a cystathionine bridge
EGSAFXIXQDWGEHRAEGE

SEQ ID NO: 380 - protein, 18 aa, Artificial Sequence
  compstatin analogue
  MISC_FEATURE (6)..(6): Xaa = homocysteine whose side chain forms a cystathionine bridge
  MISC_FEATURE (8)..(8): Xaa = 1-Me-Trp
  MISC_FEATURE (16)..(16): Ala whose side chain forms a cystathionine bridge
EGSAYXIXQDWGEHRATE

SEQ ID NO: 381 - protein, 18 aa, Artificial Sequence
  compstatin analogue
  MISC_FEATURE (6)..(6): Xaa = homocysteine whose side chain forms a cystathionine bridge
  MISC_FEATURE (8)..(8): Xaa = 2-Nal
  MISC_FEATURE (16)..(16): Ala whose side chain forms a cystathionine bridge
EGSAFXIXQDWGEHRATE

SEQ ID NO: 382 - protein, 17 aa, Artificial Sequence
  compstatin analogue
  MISC_FEATURE (2)..(2): Xaa = homocysteine whose side chain forms a cystathionine bridge
  MISC_FEATURE (4)..(4): Xaa = 2-Nal
  MISC_FEATURE (12)..(12): Ala whose side chain forms a cystathionine bridge
FXIXQDWGEHRATGAES

SEQ ID NO: 383 - protein, 17 aa, Artificial Sequence
  compstatin analogue
  MISC_FEATURE (2)..(2): Xaa = homocysteine whose side chain forms a cystathionine bridge
  MISC_FEATURE (4)..(4): Xaa = 1-Me-Trp
  MISC_FEATURE (12)..(12): Ala whose side chain forms a cystathionine bridge
YXIXQDWGEHRATGAES

SEQ ID NO: 384 - protein, 17 aa, Artificial Sequence
  compstatin analogue
  MISC_FEATURE (2)..(2): Xaa = homocysteine whose side chain forms a cystathionine bridge
  MISC_FEATURE (4)..(4): Xaa = 1-Nal
  MISC_FEATURE (12)..(12): Ala whose side chain forms a cystathionine bridge
FXIXQDWGEHRATGAES

SEQ ID NO: 385 - protein, 17 aa, Artificial Sequence
  compstatin analogue
  MISC_FEATURE (2)..(2): Xaa = homocysteine whose side chain forms a cystathionine bridge
  MISC_FEATURE (4)..(4): Xaa = 2-Nal
  MISC_FEATURE (12)..(12): Ala whose side chain forms a cystathionine bridge
FXIXQDWGEHRATGAES

SEQ ID NO: 386 - protein, 17 aa, Artificial Sequence
  compstatin analogue
  MISC_FEATURE (2)..(2): Xaa = homocysteine whose side chain forms a cystathionine bridge
  MISC_FEATURE (4)..(4): Xaa = 2-Nal
  MISC_FEATURE (12)..(12): Ala whose side chain forms a cystathionine bridge
YXIXQDWGEHRATGAES

SEQ ID NO: 387 - protein, 17 aa, Artificial Sequence
  compstatin analogue
  MISC_FEATURE (2)..(2): Xaa = homocysteine whose side chain forms a cystathionine bridge
  MISC_FEATURE (12)..(12): Ala whose side chain forms a cystathionine bridge
YXIWQDWGEHRATGAES

SEQ ID NO: 388 - protein, 19 aa, Artificial Sequence
  compstatin analogue
  MISC_FEATURE (4)..(4): Xaa = homocysteine whose side chain forms a cystathionine bridge
  MISC_FEATURE (6)..(6): Xaa = 2-Me-Trp
  MISC_FEATURE (14)..(14): Ala whose side chain forms a cystathionine bridge
SEFXIXQDWGEHRATGAES

SEQ ID NO: 389 - protein, 17 aa, Artificial Sequence
  compstatin analogue
  MISC_FEATURE (2)..(2): Xaa = homocysteine whose side chain forms a cystathionine bridge
  MISC_FEATURE (4)..(4): Xaa = 1-Me-Trp
  MISC_FEATURE (12)..(12): Ala whose side chain forms a cystathionine bridge
YXIXQDWGEHRATEAGS

SEQ ID NO: 390 - protein, 17 aa, Artificial Sequence
  compstatin analogue
  MISC_FEATURE (2)..(2): Xaa = homocysteine whose side chain forms a cystathionine bridge
  MISC_FEATURE (4)..(4): Xaa = 1-Me-Trp
  MISC_FEATURE (12)..(12): Ala whose side chain forms a cystathionine bridge
YXIXQDWGEHRATESGA

SEQ ID NO: 391 - protein, 18 aa, Artificial Sequence
  compstatin analogue
  MISC_FEATURE (6)..(6): Xaa = homocysteine whose side chain forms a cystathionine bridge
  MISC_FEATURE (8)..(8): Xaa = 1-Me-Trp
  MISC_FEATURE (16)..(16): Ala whose side chain forms a cystathionine bridge
  MISC_FEATURE (17)..(17): Xaa = Sar
EGSAYXIXQEWGEHRAXE

SEQ ID NO: 392 - protein, 17 aa, Artificial Sequence
  compstatin analogue
  MISC_FEATURE (4)..(4): Xaa = homocysteine whose side chain forms a cystathionine bridge
  MISC_FEATURE (6)..(6): Xaa = 1-Me-Trp
  MISC_FEATURE (14)..(14): Ala whose side chain forms a cystathionine bridge
  MISC_FEATURE (15)..(15): Xaa = Sar
SEYXIXQDWGEHRAXEA

SEQ ID NO: 393 - protein, 17 aa, Artificial Sequence
  compstatin analogue
  MISC_FEATURE (2)..(2): Xaa = homocysteine whose side chain forms a cystathionine bridge
  MISC_FEATURE (4)..(4): Xaa = 1-Me-Trp
  MISC_FEATURE (8)..(8): Xaa = Sar
  MISC_FEATURE (12)..(12): Ala whose side chain forms a cystathionine bridge
FXIXQDWXEHRATGAES

SEQ ID NO: 394 - protein, 18 aa, Artificial Sequence
  compstatin analogue
  MISC_FEATURE (1)..(1): Xaa = d-Tyrosene
  MISC_FEATURE (3)..(3): Xaa = homocysteine whose side chain forms a cystathionine bridge
  MISC_FEATURE (5)..(5): Xaa = 1-Me-Trp
  MISC_FEATURE (9)..(9): Xaa = Sar
  MISC_FEATURE (13)..(13): Ala whose side chain forms a cystathionine bridge
XFXIXQDWXEHRATGAES

SEQ ID NO: 395 - protein, 19 aa, Artificial Sequence
  compstatin analogue
  MISC_FEATURE (4)..(4): Xaa = homocysteine whose side chain forms a cystathionine bridge
  MISC_FEATURE (6)..(6): Xaa = 1-Me-Trp
  MISC_FEATURE (14)..(14): Ala whose side chain forms a cystathionine bridge
  MISC_FEATURE (15)..(15): Xaa = Sar
SEFXIXQDWGEHRAXGAES

SEQ ID NO: 396 - protein, 17 aa, Artificial Sequence
  compstatin analogue
  MISC_FEATURE (4)..(4): Xaa = homocysteine whose side chain forms a cystathionine bridge
  MISC_FEATURE (6)..(6): Xaa = 1-Me-Trp
  MISC_FEATURE (14)..(14): Ala whose side chain forms a cystathionine bridge
  MISC_FEATURE (15)..(15): Xaa = Sar
SEFXIXQDWGEHRAXEA

SEQ ID NO: 397 - protein, 17 aa, Artificial Sequence
  compstatin analogue
  MISC_FEATURE (4)..(4): Xaa = homocysteine whose side chain forms a cystathionine bridge
  MISC_FEATURE (6)..(6): Xaa = 1-Me-Trp
  MISC_FEATURE (10)..(10): Xaa = Sar
  MISC_FEATURE (14)..(14): Ala whose side chain forms a cystathionine bridge
  MISC_FEATURE (15)..(15): Xaa = Sar
SEFXIXQDWXEHRAXEA

SEQ ID NO: 398 - protein, 17 aa, Artificial Sequence
  compstatin analogue
  MISC_FEATURE (4)..(4): Xaa = homocysteine whose side chain forms a cystathionine bridge
  MISC_FEATURE (6)..(6): Xaa = 1-Me-Trp
  MISC_FEATURE (10)..(10): Xaa = Sar
  MISC_FEATURE (14)..(14): Ala whose side chain forms a cystathionine bridge
SEFXIXQDWXEHRATEA

SEQ ID NO: 399 - protein, 16 aa, Artificial Sequence
  compstatin analogue
  MISC_FEATURE (4)..(4): Xaa = homocysteine whose side chain forms a cystathionine bridge
  MISC_FEATURE (6)..(6): Xaa = 1-Me-Trp
  MISC_FEATURE (14)..(14): Ala whose side chain forms a cystathionine bridge
  MISC_FEATURE (15)..(15): Xaa = Sar
SEFXIXQDWGEHRAXE

SEQ ID NO: 400 - protein, 16 aa, Artificial Sequence
  compstatin analogue
  MISC_FEATURE (4)..(4): Xaa = homocysteine whose side chain forms a cystathionine bridge
  MISC_FEATURE (6)..(6): Xaa = 1-Me-Trp
  MISC_FEATURE (10)..(10): Xaa = Sar
  MISC_FEATURE (14)..(14): Ala whose side chain forms a cystathionine bridge
  MISC_FEATURE (15)..(15): Xaa = Sar
SEFXIXQDWXEHRAXE

SEQ ID NO: 401 - protein, 16 aa, Artificial Sequence
  compstatin analogue
  MISC_FEATURE (3)..(3): Xaa = homocysteine whose side chain forms a cystathionine bridge
  MISC_FEATURE (5)..(5): Xaa = 1-Me-Trp
  MISC_FEATURE (13)..(13): Ala whose side chain forms a cystathionine bridge
  MISC_FEATURE (14)..(14): Xaa = Sar
EFXIXQDWGEHRAXEA

SEQ ID NO: 402 - protein, 17 aa, Artificial Sequence
  compstatin analogue
  MISC_FEATURE (3)..(3): Xaa = Sar
  MISC_FEATURE (4)..(4): Xaa = homocysteine whose side chain forms a cystathionine bridge
  MISC_FEATURE (6)..(6): Xaa = 1-Me-Trp
  MISC_FEATURE (14)..(14): Ala whose side chain forms a cystathionine bridge
  MISC_FEATURE (15)..(15): Xaa = Sar
SEXXIXQDWGEHRAXEA

SEQ ID NO: 403 - protein, 17 aa, Artificial Sequence
  compstatin analogue
  MISC_FEATURE (3)..(3): Xaa = Sar
  MISC_FEATURE (4)..(4): Xaa = homocysteine whose side chain forms a cystathionine bridge
  MISC_FEATURE (6)..(6): Xaa = 1-Me-Trp
  MISC_FEATURE (14)..(14): Ala whose side chain forms a cystathionine bridge
SEXXIXQDWGEHRATEA

SEQ ID NO: 404 - protein, 17 aa, Artificial Sequence
  compstatin analogue
  MISC_FEATURE (4)..(4): Xaa = homocysteine whose side chain forms a cystathionine bridge
  MISC_FEATURE (6)..(6): Xaa = 1-Me-Trp
  MISC_FEATURE (14)..(14): Ala whose side chain forms a cystathionine bridge
  MISC_FEATURE (15)..(15): Xaa = Sar
SEFXIXQEWGEHRAXEA

SEQ ID NO: 405 - protein, 17 aa, Artificial Sequence
  compstatin analogue
  MISC_FEATURE (4)..(4): Xaa = homocysteine whose side chain forms a cystathionine bridge
  MISC_FEATURE (6)..(6): Xaa = 1-Me-Trp
  MISC_FEATURE (14)..(14): Ala whose side chain forms a cystathionine bridge
SEFXIXQDWGEHRASEA

SEQ ID NO: 406 - protein, 15 aa, Artificial Sequence
  compstatin analogue
  MISC_FEATURE (3)..(3): Xaa = homocysteine whose side chain forms a cystathionine bridge
  MISC_FEATURE (5)..(5): Xaa = 1-Me-Trp
  MISC_FEATURE (13)..(13): Ala whose side chain forms a cystathionine bridge
EFXIXQDWGEHRAES

SEQ ID NO: 407 - protein, 17 aa, Artificial Sequence
  compstatin analogue
  MISC_FEATURE (4)..(4): Xaa = homocysteine whose side chain forms a cystathionine bridge
  MISC_FEATURE (6)..(6): Xaa = 1-Me-Trp
  MISC_FEATURE (14)..(14): Ala whose side chain forms a cystathionine bridge
  MISC_FEATURE (15)..(15): Xaa = Sar
SEFXIXQDWGEHKAXEA

SEQ ID NO: 408 - protein, 17 aa, Artificial Sequence
  compstatin analogue
  MISC_FEATURE (4)..(4): Xaa = homocysteine whose side chain forms a cystathionine bridge
  MISC_FEATURE (6)..(6): Xaa = 1-Me-Trp
  MISC_FEATURE (14)..(14): Ala whose side chain forms a cystathionine bridge
  MISC_FEATURE (15)..(15): Xaa = Sar
GEFXIXQDWGEHRAXEA

SEQ ID NO: 409 - protein, 17 aa, Artificial Sequence
  compstatin analogue
  MISC_FEATURE (3)..(3): Xaa = Sar
  MISC_FEATURE (4)..(4): Xaa = homocysteine whose side chain forms a cystathionine bridge
  MISC_FEATURE (6)..(6): Xaa = 1-Me-Trp
  MISC_FEATURE (14)..(14): Ala whose side chain forms a cystathionine bridge
GEXXIXQDWGEHRATEA

SEQ ID NO: 410 - protein, 17 aa, Artificial Sequence
  compstatin analogue
  MISC_FEATURE (3)..(3): Xaa = Sar
  MISC_FEATURE (4)..(4): Xaa = homocysteine whose side chain forms a cystathionine bridge
  MISC_FEATURE (6)..(6): Xaa = 1-Me-Trp
  MISC_FEATURE (10)..(10): Xaa = Sar
  MISC_FEATURE (14)..(14): Ala whose side chain forms a cystathionine bridge
SEXXIXQEWXEHRATEA

SEQ ID NO: 411 - protein, 17 aa, Artificial Sequence
  compstatin analogue
  MISC_FEATURE (3)..(3): Xaa = Sar
  MISC_FEATURE (4)..(4): Xaa = homocysteine whose side chain forms a cystathionine bridge
  MISC_FEATURE (6)..(6): Xaa = 1-Me-Trp
  MISC_FEATURE (14)..(14): Ala whose side chain forms a cystathionine bridge
  MISC_FEATURE (15)..(15): Xaa = Sar
SEXXIXQEWGEHRAXEA

SEQ ID NO: 412 - protein, 16 aa, Artificial Sequence
  compstatin analogue
  MISC_FEATURE (1)..(1): Xaa = d-tyrosene
  MISC_FEATURE (2)..(2): Xaa = Sar
  MISC_FEATURE (3)..(3): Xaa = homocysteine whose side chain forms a cystathionine bridge
  MISC_FEATURE (5)..(5): Xaa = 1-Me-Trp
  MISC_FEATURE (13)..(13): Ala whose side chain forms a cystathionine bridge
XXXIXQDWGEHRATEA

SEQ ID NO: 413 - protein, 17 aa, Artificial Sequence
  compstatin analogue
  MISC_FEATURE (6)..(6): Ala whose side chain forms a cystathionine bridge
  MISC_FEATURE (16)..(16): Xaa = homocysteine whose side chain forms a cystathionine bridge
ESSAIAIWQDWGEHRXT

SEQ ID NO: 414 - protein, 13 aa, Artificial Sequence
  compstatin analogue
  MISC_FEATURE (2)..(2): Ala whose side chain forms a cystathionine bridge
  MISC_FEATURE (4)..(4): Xaa is 1MeTrp
  MISC_FEATURE (12)..(12): Xaa = homocysteine whose side chain forms a cystathionine bridge
IAIXQDWGEHRXT

SEQ ID NO: 415 - protein, 17 aa, Artificial Sequence
  compstatin analogue
  MISC_FEATURE (2)..(2): Ala whose side chain forms a cystathionine bridge
  MISC_FEATURE (12)..(12): Xaa = homocysteine whose side chain forms a cystathionine bridge
IAIWQKWGAHRXTGAES

SEQ ID NO: 416 - protein, 17 aa, Artificial Sequence
  compstatin analogue
  MISC_FEATURE (6)..(6): Ala whose side chain forms a cystathionine bridge
  MISC_FEATURE (16)..(16): Xaa = homocysteine whose side chain forms a cystathionine bridge
ESSAYAIWQDWGEHRXT

SEQ ID NO: 417 - protein, 21 aa, Artificial Sequence
  compstatin analogue
  MISC_FEATURE (6)..(6): Ala whose side chain forms a cystathionine bridge
  MISC_FEATURE (16)..(16): Xaa = homocysteine whose side chain forms a cystathionine bridge
ESSAIAIWQDWGEHRXTGAES

SEQ ID NO: 418 - protein, 17 aa, Artificial Sequence
  compstatin analogue
  MISC_FEATURE (2)..(2): Ala whose side chain forms a cystathionine bridge
  MISC_FEATURE (12)..(12): Xaa = homocysteine whose side chain forms a cystathionine bridge
IAIWQDWGEHRXTGAES

SEQ ID NO: 419 - protein, 16 aa, Artificial Sequence
  compstatin analogue
  MISC_FEATURE (2)..(2): Ala whose side chain forms a cystathionine bridge
  MISC_FEATURE (12)..(12): Xaa = homocysteine whose side chain forms a cystathionine bridge
IAIWQDWGEHRXTEGE

SEQ ID NO: 420 - protein, 15 aa, Artificial Sequence
  compstatin analogue
  MISC_FEATURE (2)..(2): Ala whose side chain forms a cystathionine bridge
  MISC_FEATURE (12)..(12): Xaa = homocysteine whose side chain forms a cystathionine bridge
IAIWQDWGEHRXTEA

SEQ ID NO: 421 - protein, 14 aa, Artificial Sequence
  compstatin analogue
  MISC_FEATURE (2)..(2): Ala whose side chain forms a cystathionine bridge
  MISC_FEATURE (12)..(12): Xaa = homocysteine whose side chain forms a cystathionine bridge
IAIWQDWGEHRXTE

SEQ ID NO: 422 - protein, 15 aa, Artificial Sequence
  compstatin analogue
  MISC_FEATURE (2)..(2): Ala whose side chain forms a cystathionine bridge
  MISC_FEATURE (12)..(12): Xaa = homocysteine whose side chain forms a cystathionine bridge
IAIWQDWGEHRXEGE

SEQ ID NO: 423 - protein, 18 aa, Artificial Sequence
  compstatin analogue
  MISC_FEATURE (6)..(6): Ala whose side chain forms a cystathionine bridge
  MISC_FEATURE (16)..(16): Xaa = homocysteine whose side chain forms a cystathionine bridge
  MISC_FEATURE (17)..(17): Xaa = Sar
EGSAIAIWQDWGEHRXXE

SEQ ID NO: 424 - protein, 17 aa, Artificial Sequence
  compstatin analogue
  MISC_FEATURE (6)..(6): Ala whose side chain forms a cystathionine bridge
  MISC_FEATURE (16)..(16): Xaa = homocysteine whose side chain forms a cystathionine bridge
EGSAIAIWQDWGEHRXT

SEQ ID NO: 425 - protein, 16 aa, Artificial Sequence
  compstatin analogue
  MISC_FEATURE (5)..(5): Ala whose side chain forms a cystathionine bridge
  MISC_FEATURE (15)..(15): Xaa = homocysteine whose side chain forms a cystathionine bridge
EGEIAIWQDWGEHRXT

SEQ ID NO: 426 - protein, 16 aa, Artificial Sequence
  compstatin analogue
  MISC_FEATURE (5)..(5): Ala whose side chain forms a cystathionine bridge
  MISC_FEATURE (15)..(15): Xaa = homocysteine whose side chain forms a cystathionine bridge
ESEIAIWQDWGEHRXT

SEQ ID NO: 427 - protein, 17 aa, Artificial Sequence
  compstatin analogue
  MISC_FEATURE (4)..(4): Ala whose side chain forms a cystathionine bridge
  MISC_FEATURE (14)..(14): Xaa = homocysteine whose side chain forms a cystathionine bridge
SEIAIWQDWGEHRXTEA

SEQ ID NO: 428 - protein, 15 aa, Artificial Sequence
  compstatin analogue
  MISC_FEATURE (3)..(3): Ala whose side chain forms a cystathionine bridge
  MISC_FEATURE (13)..(13): Xaa = homocysteine whose side chain forms a cystathionine bridge
EIAIWQDWGEHRXTE

SEQ ID NO: 429 - protein, 17 aa, Artificial Sequence
  compstatin analogue
  MISC_FEATURE (3)..(3): Ala whose side chain forms a cystathionine bridge
  MISC_FEATURE (13)..(13): Xaa = homocysteine whose side chain forms a cystathionine bridge
EIAIWQDWGEHRXTEGE

SEQ ID NO: 430 - protein, 18 aa, Artificial Sequence
  compstatin analogue
  MISC_FEATURE (5)..(5): Ala whose side chain forms a cystathionine bridge
  MISC_FEATURE (15)..(15): Xaa = homocysteine whose side chain forms a cystathionine bridge
EGEIAIWQDWGEHRXEGE

SEQ ID NO: 431 - protein, 18 aa, Artificial Sequence
  compstatin analogue
  MISC_FEATURE (5)..(5): Ala whose side chain forms a cystathionine bridge
  MISC_FEATURE (15)..(15): Xaa = homocysteine whose side chain forms a cystathionine bridge
ESEIAIWQDWGEHRXEGE

SEQ ID NO: 432 - protein, 19 aa, Artificial Sequence
  compstatin analogue
  MISC_FEATURE (5)..(5): Ala whose side chain forms a cystathionine bridge
  MISC_FEATURE (15)..(15): Xaa = homocysteine whose side chain forms a cystathionine bridge
KEKIAIWQDWGEHRXTEKE

SEQ ID NO: 433 - protein, 19 aa, Artificial Sequence
  compstatin analogue
  MISC_FEATURE (5)..(5): Ala whose side chain forms a cystathionine bridge
  MISC_FEATURE (15)..(15): Xaa = homocysteine whose side chain forms a cystathionine bridge
EKGIAIWQDWGEHRXTEKP

SEQ ID NO: 434 - protein, 16 aa, Artificial Sequence
  compstatin analogue
  MISC_FEATURE (2)..(2): Ala whose side chain forms a cystathionine bridge
  MISC_FEATURE (12)..(12): Xaa = homocysteine whose side chain forms a cystathionine bridge
IAIWQDWGEHRXTEGK

SEQ ID NO: 435 - protein, 17 aa, Artificial Sequence
  compstatin analogue
  MISC_FEATURE (5)..(5): Ala whose side chain forms a cystathionine bridge
  MISC_FEATURE (15)..(15): Xaa = homocysteine whose side chain forms a cystathionine bridge
  MISC_FEATURE (16)..(16): Xaa = Sar
GSAIAIWQDWGEHRXXE

SEQ ID NO: 436 - protein, 16 aa, Artificial Sequence
  compstatin analogue
  MISC_FEATURE (4)..(4): Ala whose side chain forms a cystathionine bridge
  MISC_FEATURE (14)..(14): Xaa = homocysteine whose side chain forms a cystathionine bridge
  MISC_FEATURE (15)..(15): Xaa = Sar
SAIAIWQDWGEHRXXE

SEQ ID NO: 437 - protein, 17 aa, Artificial Sequence
  compstatin analogue
  MISC_FEATURE (4)..(4): Ala whose side chain forms a cystathionine bridge
  MISC_FEATURE (14)..(14): Xaa = homocysteine whose side chain forms a cystathionine bridge
SAIAIWQDWGEHRXTEG

SEQ ID NO: 438 - protein, 16 aa, Artificial Sequence
  compstatin analogue
  MISC_FEATURE (2)..(2): Ala whose side chain forms a cystathionine bridge
  MISC_FEATURE (12)..(12): Xaa = homocysteine whose side chain forms a cystathionine bridge
FAIWQDWGEHRXTGAE

SEQ ID NO: 439 - protein, 20 aa, Artificial Sequence
  compstatin analogue
  MISC_FEATURE (6)..(6): Ala whose side chain forms a cystathionine bridge
  MISC_FEATURE (16)..(16): Xaa = homocysteine whose side chain forms a cystathionine bridge
  MISC_FEATURE (17)..(17): Xaa = Sar
EGSAIAIWQDWGEHRXXEGE

SEQ ID NO: 440 - protein, 18 aa, Artificial Sequence
  compstatin analogue
  MISC_FEATURE (6)..(6): Ala whose side chain forms a cystathionine bridge
  MISC_FEATURE (16)..(16): Xaa = homocysteine whose side chain forms a cystathionine bridge
  MISC_FEATURE (17)..(17): Xaa = Sar
EGSAFAIWQDWGEHRXXE

SEQ ID NO: 441 - protein, 17 aa, Artificial Sequence
  compstatin analogue
  MISC_FEATURE (6)..(6): Ala whose side chain forms a cystathionine bridge
  MISC_FEATURE (16)..(16): Xaa = homocysteine whose side chain forms a cystathionine bridge
ESSAIAIWQDWGAHRXT

SEQ ID NO: 442 - protein, 17 aa, Artificial Sequence
  compstatin analogue
  MISC_FEATURE (2)..(2): Ala whose side chain forms a cystathionine bridge
  MISC_FEATURE (12)..(12): Xaa = homocysteine whose side chain forms a cystathionine bridge
IAIWQDWGAHRXTGAES

SEQ ID NO: 443 - protein, 14 aa, Artificial Sequence
  compstatin analogue
  MISC_FEATURE (1)..(1): Xaa = d-tyrosene
  MISC_FEATURE (3)..(3): Ala whose side chain forms a cystathionine bridge
  MISC_FEATURE (5)..(5): Xaa = 1-Me-Trp
  MISC_FEATURE (9)..(9): Xaa = Sar
  MISC_FEATURE (13)..(13): Xaa = homocysteine whose side chain forms a cystathionine bridge
  MISC_FEATURE (14)..(14): Xaa = N-Me-Ile
XIAIXQDWXAHRXX

SEQ ID NO: 444 - protein, 18 aa, Artificial Sequence
  compstatin analogue
  MISC_FEATURE (6)..(6): Ala whose side chain forms a cystathionine bridge
  MISC_FEATURE (8)..(8): Xaa = 1-Me-Trp
  MISC_FEATURE (16)..(16): Xaa = homocysteine whose side chain forms a cystathionine bridge
  MISC_FEATURE (17)..(17): Xaa = Sar
EGSAIAIXQDWGEHRXXE

SEQ ID NO: 445 - protein, 18 aa, Artificial Sequence
  compstatin analogue
  MISC_FEATURE (6)..(6): Ala whose side chain forms a cystathionine bridge
  MISC_FEATURE (8)..(8): Xaa = 2-Nal
  MISC_FEATURE (16)..(16): Xaa = homocysteine whose side chain forms a cystathionine bridge
  MISC_FEATURE (17)..(17): Xaa = Sar
EGSAIAIXQDWGEHRXXE

SEQ ID NO: 446 - protein, 17 aa, Artificial Sequence
  compstatin analogue
  MISC_FEATURE (2)..(2): Ala whose side chain forms a cystathionine bridge
  MISC_FEATURE (4)..(4): Xaa = 1-Me-Trp
  MISC_FEATURE (12)..(12): Xaa = homocysteine whose side chain forms a cystathionine bridge
IAIXQDWGEHRXTGAES

SEQ ID NO: 447 - protein, 17 aa, Artificial Sequence
  compstatin analogue
  MISC_FEATURE (2)..(2): Ala whose side chain forms a cystathionine bridge
  MISC_FEATURE (4)..(4): Xaa = 2-Nal
  MISC_FEATURE (12)..(12): Xaa = homocysteine whose side chain forms a cystathionine bridge
IAIXQDWGEHRXTGAES

SEQ ID NO: 448 - protein, 18 aa, Artificial Sequence
  compstatin analogue
  MISC_FEATURE (6)..(6): Ala whose side chain forms a cystathionine bridge
  MISC_FEATURE (8)..(8): Xaa = 1-Me-Trp
  MISC_FEATURE (16)..(16): Xaa = homocysteine whose side chain forms a cystathionine bridge
  MISC_FEATURE (17)..(17): Xaa = Sar
EGSAFAIXQDWGEHRXXE

SEQ ID NO: 449 - protein, 18 aa, Artificial Sequence
  compstatin analogue
  MISC_FEATURE (6)..(6): Ala whose side chain forms a cystathionine bridge
  MISC_FEATURE (8)..(8): Xaa = 1-Me-Trp
  MISC_FEATURE (16)..(16): Xaa = homocysteine whose side chain forms a cystathionine bridge
  MISC_FEATURE (17)..(17): Xaa = Sar
EGSAYAIXQDWGEHRXXE

SEQ ID NO: 450 - protein, 18 aa, Artificial Sequence
  compstatin analogue
  MISC_FEATURE (6)..(6): Ala whose side chain forms a cystathionine bridge
  MISC_FEATURE (16)..(16): Xaa = homocysteine whose side chain forms a cystathionine bridge
EGSAIAIWQDWGEHRXTE

SEQ ID NO: 451 - protein, 18 aa, Artificial Sequence
  compstatin analogue
  MISC_FEATURE (6)..(6): Ala whose side chain forms a cystathionine bridge
  MISC_FEATURE (8)..(8): Xaa =  1-Nal
  MISC_FEATURE (16)..(16): Xaa = homocysteine whose side chain forms a cystathionine bridge
EGSAFAIXQDWGEHRXTE

SEQ ID NO: 452 - protein, 18 aa, Artificial Sequence
  compstatin analogue
  MISC_FEATURE (6)..(6): Ala whose side chain forms a cystathionine bridge
  MISC_FEATURE (8)..(8): Xaa = 1-Me-Trp
  MISC_FEATURE (16)..(16): Xaa = homocysteine whose side chain forms a cystathionine bridge
EGSAFAIXQDWGEHRXTE

SEQ ID NO: 453 - protein, 19 aa, Artificial Sequence
  compstatin analogue
  MISC_FEATURE (6)..(6): Ala whose side chain forms a cystathionine bridge
  MISC_FEATURE (8)..(8): Xaa = 1-Me-Trp
  MISC_FEATURE (16)..(16): Xaa = homocysteine whose side chain forms a cystathionine bridge
EGSAFAIXQDWGEHRXEGE

SEQ ID NO: 454 - protein, 18 aa, Artificial Sequence
  compstatin analogue
  MISC_FEATURE (6)..(6): Ala whose side chain forms a cystathionine bridge
  MISC_FEATURE (8)..(8): Xaa = 1-Me-Trp
  MISC_FEATURE (16)..(16): Xaa = homocysteine whose side chain forms a cystathionine bridge
EGSAYAIXQDWGEHRXTE

SEQ ID NO: 455 - protein, 18 aa, Artificial Sequence
  compstatin analogue
  MISC_FEATURE (6)..(6): Ala whose side chain forms a cystathionine bridge
  MISC_FEATURE (8)..(8): Xaa = 2-Nal
  MISC_FEATURE (16)..(16): Xaa = homocysteine whose side chain forms a cystathionine bridge
EGSAFAIXQDWGEHRXTE

SEQ ID NO: 456 - protein, 17 aa, Artificial Sequence
  compstatin analogue
  MISC_FEATURE (2)..(2): Ala whose side chain forms a cystathionine bridge
  MISC_FEATURE (4)..(4): Xaa = 2-Nal
  MISC_FEATURE (12)..(12): Xaa = homocysteine whose side chain forms a cystathionine bridge
FAIXQDWGEHRXTGAES

SEQ ID NO: 457 - protein, 17 aa, Artificial Sequence
  compstatin analogue
  MISC_FEATURE (2)..(2): Ala whose side chain forms a cystathionine bridge
  MISC_FEATURE (4)..(4): Xaa = 1-Me-Trp
  MISC_FEATURE (12)..(12): Xaa = homocysteine whose side chain forms a cystathionine bridge
YAIXQDWGEHRXTGAES

SEQ ID NO: 458 - protein, 17 aa, Artificial Sequence
  compstatin analogue
  MISC_FEATURE (2)..(2): Ala whose side chain forms a cystathionine bridge
  MISC_FEATURE (4)..(4): Xaa = 1-Nal
  MISC_FEATURE (12)..(12): Xaa = homocysteine whose side chain forms a cystathionine bridge
FAIXQDWGEHRXTGAES

SEQ ID NO: 459 - protein, 17 aa, Artificial Sequence
  compstatin analogue
  MISC_FEATURE (2)..(2): Ala whose side chain forms a cystathionine bridge
  MISC_FEATURE (4)..(4): Xaa = 2-Nal
  MISC_FEATURE (12)..(12): Xaa = homocysteine whose side chain forms a cystathionine bridge
FAIXQDWGEHRXTGAES

SEQ ID NO: 460 - protein, 17 aa, Artificial Sequence
  compstatin analogue
  MISC_FEATURE (2)..(2): Ala whose side chain forms a cystathionine bridge
  MISC_FEATURE (4)..(4): Xaa = 2-Nal
  MISC_FEATURE (12)..(12): Xaa = homocysteine whose side chain forms a cystathionine bridge
YAIXQDWGEHRXTGAES

SEQ ID NO: 461 - protein, 17 aa, Artificial Sequence
  compstatin analogue
  MISC_FEATURE (2)..(2): Ala whose side chain forms a cystathionine bridge
  MISC_FEATURE (12)..(12): Xaa = homocysteine whose side chain forms a cystathionine bridge
YAIWQDWGEHRXTGAES

SEQ ID NO: 462 - protein, 19 aa, Artificial Sequence
  compstatin analogue
  MISC_FEATURE (4)..(4): Ala whose side chain forms a cystathionine bridge
  MISC_FEATURE (6)..(6): Xaa = 2-Me-Trp
  MISC_FEATURE (14)..(14): Xaa = homocysteine whose side chain forms a cystathionine bridge
SEFAIXQDWGEHRXTGAES

SEQ ID NO: 463 - protein, 17 aa, Artificial Sequence
  compstatin analogue
  MISC_FEATURE (2)..(2): Ala whose side chain forms a cystathionine bridge
  MISC_FEATURE (4)..(4): Xaa = 1-Me-Trp
  MISC_FEATURE (12)..(12): Xaa = homocysteine whose side chain forms a cystathionine bridge
YAIXQDWGEHRXTEAGS

SEQ ID NO: 464 - protein, 17 aa, Artificial Sequence
  compstatin analogue
  MISC_FEATURE (2)..(2): Ala whose side chain forms a cystathionine bridge
  MISC_FEATURE (4)..(4): Xaa = 1-Me-Trp
  MISC_FEATURE (12)..(12): Xaa = homocysteine whose side chain forms a cystathionine bridge
YAIXQDWGEHRXTESGA

SEQ ID NO: 465 - protein, 18 aa, Artificial Sequence
  compstatin analogue
  MISC_FEATURE (6)..(6): Ala whose side chain forms a cystathionine bridge
  MISC_FEATURE (8)..(8): Xaa = 1-Me-Trp
  MISC_FEATURE (16)..(16): Xaa = homocysteine whose side chain forms a cystathionine bridge
  MISC_FEATURE (17)..(17): Xaa = Sar
EGSAYAIXQEWGEHRXXE

SEQ ID NO: 466 - protein, 17 aa, Artificial Sequence
  compstatin analogue
  MISC_FEATURE (4)..(4): Ala whose side chain forms a cystathionine bridge
  MISC_FEATURE (6)..(6): Xaa = 1-Me-Trp
  MISC_FEATURE (14)..(14): Xaa = homocysteine whose side chain forms a cystathionine bridge
  MISC_FEATURE (15)..(15): Xaa = Sar
SEYAIXQDWGEHRXXEA

SEQ ID NO: 467 - protein, 17 aa, Artificial Sequence
  compstatin analogue
  MISC_FEATURE (2)..(2): Ala whose side chain forms a cystathionine bridge
  MISC_FEATURE (4)..(4): Xaa = 1-Me-Trp
  MISC_FEATURE (8)..(8): Xaa = Sar
  MISC_FEATURE (12)..(12): Xaa = homocysteine whose side chain forms a cystathionine bridge
FAIXQDWXEHRXTGAES

SEQ ID NO: 468 - protein, 18 aa, Artificial Sequence
  compstatin analogue
  MISC_FEATURE (1)..(1): Xaa = d-Tyrosene
  MISC_FEATURE (3)..(3): Ala whose side chain forms a cystathionine bridge
  MISC_FEATURE (5)..(5): Xaa = 1-Me-Trp
  MISC_FEATURE (9)..(9): Xaa = Sar
  MISC_FEATURE (13)..(13): Xaa = homocysteine whose side chain forms a cystathionine bridge
XFAIXQDWXEHRXTGAES

SEQ ID NO: 469 - protein, 19 aa, Artificial Sequence
  compstatin analogue
  MISC_FEATURE (4)..(4): Ala whose side chain forms a cystathionine bridge
  MISC_FEATURE (6)..(6): Xaa = 1-Me-Trp
  MISC_FEATURE (14)..(14): Xaa = homocysteine whose side chain forms a cystathionine bridge
  MISC_FEATURE (15)..(15): Xaa = Sar
SEFAIXQDWGEHRXXGAES

SEQ ID NO: 470 - protein, 17 aa, Artificial Sequence
  compstatin analogue
  MISC_FEATURE (4)..(4): Ala whose side chain forms a cystathionine bridge
  MISC_FEATURE (6)..(6): Xaa = 1-Me-Trp
  MISC_FEATURE (14)..(14): Xaa = homocysteine whose side chain forms a cystathionine bridge
  MISC_FEATURE (15)..(15): Xaa = Sar
SEFAIXQDWGEHRXXEA

SEQ ID NO: 471 - protein, 17 aa, Artificial Sequence
  compstatin analogue
  MISC_FEATURE (4)..(4): Ala whose side chain forms a cystathionine bridge
  MISC_FEATURE (6)..(6): Xaa = 1-Me-Trp
  MISC_FEATURE (10)..(10): Xaa = Sar
  MISC_FEATURE (14)..(14): Xaa = homocysteine whose side chain forms a cystathionine bridge
  MISC_FEATURE (15)..(15): Xaa = Sar
SEFAIXQDWXEHRXXEA

SEQ ID NO: 472 - protein, 17 aa, Artificial Sequence
  compstatin analogue
  MISC_FEATURE (4)..(4): Ala whose side chain forms a cystathionine bridge
  MISC_FEATURE (6)..(6): Xaa = 1-Me-Trp
  MISC_FEATURE (10)..(10): Xaa = Sar
  MISC_FEATURE (14)..(14): Xaa = homocysteine whose side chain forms a cystathionine bridge
SEFAIXQDWXEHRXTEA

SEQ ID NO: 473 - protein, 16 aa, Artificial Sequence
  compstatin analogue
  MISC_FEATURE (4)..(4): Ala whose side chain forms a cystathionine bridge
  MISC_FEATURE (6)..(6): Xaa = 1-Me-Trp
  MISC_FEATURE (14)..(14): Xaa = homocysteine whose side chain forms a cystathionine bridge
  MISC_FEATURE (15)..(15): Xaa = Sar
SEFAIXQDWGEHRXXE

SEQ ID NO: 474 - protein, 16 aa, Artificial Sequence
  compstatin analogue
  MISC_FEATURE (4)..(4): Ala whose side chain forms a cystathionine bridge
  MISC_FEATURE (6)..(6): Xaa = 1-Me-Trp
  MISC_FEATURE (10)..(10): Xaa = Sar
  MISC_FEATURE (14)..(14): Xaa = homocysteine whose side chain forms a cystathionine bridge
  MISC_FEATURE (15)..(15): Xaa = Sar
SEFAIXQDWXEHRXXE

SEQ ID NO: 475 - protein, 16 aa, Artificial Sequence
  compstatin analogue
  MISC_FEATURE (3)..(3): Ala whose side chain forms a cystathionine bridge
  MISC_FEATURE (5)..(5): Xaa = 1-Me-Trp
  MISC_FEATURE (13)..(13): Xaa = homocysteine whose side chain forms a cystathionine bridge
  MISC_FEATURE (14)..(14): Xaa = Sar
EFAIXQDWGEHRXXEA

SEQ ID NO: 476 - protein, 17 aa, Artificial Sequence
  compstatin analogue
  MISC_FEATURE (3)..(3): Xaa = Sar
  MISC_FEATURE (4)..(4): Ala whose side chain forms a cystathionine bridge
  MISC_FEATURE (6)..(6): Xaa = 1-Me-Trp
  MISC_FEATURE (14)..(14): Xaa = homocysteine whose side chain forms a cystathionine bridge
  MISC_FEATURE (15)..(15): Xaa = Sar
SEXAIXQDWGEHRXXEA

SEQ ID NO: 477 - protein, 17 aa, Artificial Sequence
  compstatin analogue
  MISC_FEATURE (3)..(3): Xaa = Sar
  MISC_FEATURE (4)..(4): Ala whose side chain forms a cystathionine bridge
  MISC_FEATURE (6)..(6): Xaa = 1-Me-Trp
  MISC_FEATURE (14)..(14): Xaa = homocysteine whose side chain forms a cystathionine bridge
SEXAIXQDWGEHRXTEA

SEQ ID NO: 478 - protein, 17 aa, Artificial Sequence
  compstatin analogue
  MISC_FEATURE (4)..(4): Ala whose side chain forms a cystathionine bridge
  MISC_FEATURE (6)..(6): Xaa = 1-Me-Trp
  MISC_FEATURE (14)..(14): Xaa = homocysteine whose side chain forms a cystathionine bridge
  MISC_FEATURE (15)..(15): Xaa = Sar
SEFAIXQEWGEHRXXEA

SEQ ID NO: 479 - protein, 17 aa, Artificial Sequence
  compstatin analogue
  MISC_FEATURE (4)..(4): Ala whose side chain forms a cystathionine bridge
  MISC_FEATURE (6)..(6): Xaa = 1-Me-Trp
  MISC_FEATURE (14)..(14): Xaa = homocysteine whose side chain forms a cystathionine bridge
SEFAIXQDWGEHRXSEA

SEQ ID NO: 480 - protein, 15 aa, Artificial Sequence
  compstatin analogue
  MISC_FEATURE (3)..(3): Ala whose side chain forms a cystathionine bridge
  MISC_FEATURE (5)..(5): Xaa = 1-Me-Trp
  MISC_FEATURE (13)..(13): Xaa = homocysteine whose side chain forms a cystathionine bridge
EFAIXQDWGEHRXES

SEQ ID NO: 481 - protein, 17 aa, Artificial Sequence
  compstatin analogue
  MISC_FEATURE (4)..(4): Ala whose side chain forms a cystathionine bridge
  MISC_FEATURE (6)..(6): Xaa = 1-Me-Trp
  MISC_FEATURE (14)..(14): Xaa = homocysteine whose side chain forms a cystathionine bridge
  MISC_FEATURE (15)..(15): Xaa = Sar
SEFAIXQDWGEHKXXEA

SEQ ID NO: 482 - protein, 17 aa, Artificial Sequence
  compstatin analogue
  MISC_FEATURE (4)..(4): Ala whose side chain forms a cystathionine bridge
  MISC_FEATURE (6)..(6): Xaa = 1-Me-Trp
  MISC_FEATURE (14)..(14): Xaa = homocysteine whose side chain forms a cystathionine bridge
  MISC_FEATURE (15)..(15): Xaa = Sar
GEFAIXQDWGEHRXXEA

SEQ ID NO: 483 - protein, 17 aa, Artificial Sequence
  compstatin analogue
  MISC_FEATURE (3)..(3): Xaa = Sar
  MISC_FEATURE (4)..(4): Ala whose side chain forms a cystathionine bridge
  MISC_FEATURE (6)..(6): Xaa = 1-Me-Trp
  MISC_FEATURE (14)..(14): Xaa = homocysteine whose side chain forms a cystathionine bridge
GEXAIXQDWGEHRXTEA

SEQ ID NO: 484 - protein, 17 aa, Artificial Sequence
  compstatin analogue
  MISC_FEATURE (3)..(3): Xaa = Sar
  MISC_FEATURE (4)..(4): Ala whose side chain forms a cystathionine bridge
  MISC_FEATURE (6)..(6): Xaa = 1-Me-Trp
  MISC_FEATURE (10)..(10): Xaa = Sar
  MISC_FEATURE (14)..(14): Xaa = homocysteine whose side chain forms a cystathionine bridge
SEXAIXQEWXEHRXTEA

SEQ ID NO: 485 - protein, 17 aa, Artificial Sequence
  compstatin analogue
  MISC_FEATURE (3)..(3): Xaa = Sar
  MISC_FEATURE (4)..(4): Ala whose side chain forms a cystathionine bridge
  MISC_FEATURE (6)..(6): Xaa = 1-Me-Trp
  MISC_FEATURE (14)..(14): Xaa = homocysteine whose side chain forms a cystathionine bridge
  MISC_FEATURE (15)..(15): Xaa = Sar
SEXAIXQEWGEHRXXEA

SEQ ID NO: 486 - protein, 16 aa, Artificial Sequence
  compstatin analogue
  MISC_FEATURE (1)..(1): Xaa = d-tyrosene
  MISC_FEATURE (2)..(2): Xaa = Sar
  MISC_FEATURE (3)..(3): Ala whose side chain forms a cystathionine bridge
  MISC_FEATURE (5)..(5): Xaa = 1-Me-Trp
  MISC_FEATURE (13)..(13): Xaa = homocysteine whose side chain forms a cystathionine bridge
XXAIXQDWGEHRXTEA

SEQ ID NO: 487 - protein, 17 aa, Artificial Sequence
  compstatin analogue
  MISC_FEATURE (6)..(6): Cys whose side chain forms a lanthionine bridge
  MISC_FEATURE (16)..(16): Ala whose side chain forms a lanthionine bridge
ESSAICIWQDWGEHRAT

SEQ ID NO: 488 - protein, 13 aa, Artificial Sequence
  compstatin analogue
  MISC_FEATURE (2)..(2): Cys whose side chain forms a lanthionine bridge
  MISC_FEATURE (4)..(4): Xaa is 1-Me-Trp
  MISC_FEATURE (12)..(12): Ala whose side chain forms a lanthionine bridge
ICIXQDWGEHRAT

SEQ ID NO: 489 - protein, 17 aa, Artificial Sequence
  compstatin analogue
  MISC_FEATURE (2)..(2): Cys whose side chain forms a lanthionine bridge
  MISC_FEATURE (12)..(12): Ala whose side chain forms a lanthionine bridge
ICIWQKWGAHRATGAES

SEQ ID NO: 490 - protein, 17 aa, Artificial Sequence
  compstatin analogue
  MISC_FEATURE (6)..(6): Cys whose side chain forms a lanthionine bridge
  MISC_FEATURE (16)..(16): Ala whose side chain forms a lanthionine bridge
ESSAYCIWQDWGEHRAT

SEQ ID NO: 491 - protein, 21 aa, Artificial Sequence
  compstatin analogue
  MISC_FEATURE (6)..(6): Cys whose side chain forms a lanthionine bridge
  MISC_FEATURE (16)..(16): Ala whose side chain forms a lanthionine bridge
ESSAICIWQDWGEHRATGAES

SEQ ID NO: 492 - protein, 17 aa, Artificial Sequence
  compstatin analogue
  MISC_FEATURE (2)..(2): Cys whose side chain forms a lanthionine bridge
  MISC_FEATURE (12)..(12): Ala whose side chain forms a lanthionine bridge
ICIWQDWGEHRATGAES

SEQ ID NO: 493 - protein, 16 aa, Artificial Sequence
  compstatin analogue
  MISC_FEATURE (2)..(2): Cys whose side chain forms a lanthionine bridge
  MISC_FEATURE (12)..(12): Ala whose side chain forms a lanthionine bridge
ICIWQDWGEHRATEGE

SEQ ID NO: 494 - protein, 15 aa, Artificial Sequence
  compstatin analogue
  MISC_FEATURE (2)..(2): Cys whose side chain forms a lanthionine bridge
  MISC_FEATURE (12)..(12): Ala whose side chain forms a lanthionine bridge
ICIWQDWGEHRATEA

SEQ ID NO: 495 - protein, 14 aa, Artificial Sequence
  compstatin analogue
  MISC_FEATURE (2)..(2): Cys whose side chain forms a lanthionine bridge
  MISC_FEATURE (12)..(12): Ala whose side chain forms a lanthionine bridge
ICIWQDWGEHRATE

SEQ ID NO: 496 - protein, 15 aa, Artificial Sequence
  compstatin analogue
  MISC_FEATURE (2)..(2): Cys whose side chain forms a lanthionine bridge
  MISC_FEATURE (12)..(12): Ala whose side chain forms a lanthionine bridge
ICIWQDWGEHRAEGE

SEQ ID NO: 497 - protein, 18 aa, Artificial Sequence
  compstatin analogue
  MISC_FEATURE (6)..(6): Cys whose side chain forms a lanthionine bridge
  MISC_FEATURE (16)..(16): Ala whose side chain forms a lanthionine bridge
  MISC_FEATURE (17)..(17): Xaa = Sar
EGSAICIWQDWGEHRAXE

SEQ ID NO: 498 - protein, 17 aa, Artificial Sequence
  compstatin analogue
  MISC_FEATURE (6)..(6): Cys whose side chain forms a lanthionine bridge
  MISC_FEATURE (16)..(16): Ala whose side chain forms a lanthionine bridge
EGSAICIWQDWGEHRAT

SEQ ID NO: 499 - protein, 16 aa, Artificial Sequence
  compstatin analogue
  MISC_FEATURE (5)..(5): Cys whose side chain forms a lanthionine bridge
  MISC_FEATURE (15)..(15): Ala whose side chain forms a lanthionine bridge
EGEICIWQDWGEHRAT

SEQ ID NO: 500 - protein, 16 aa, Artificial Sequence
  compstatin analogue
  MISC_FEATURE (5)..(5): Cys whose side chain forms a lanthionine bridge
  MISC_FEATURE (15)..(15): Ala whose side chain forms a lanthionine bridge
ESEICIWQDWGEHRAT

SEQ ID NO: 501 - protein, 17 aa, Artificial Sequence
  compstatin analogue
  MISC_FEATURE (4)..(4): Cys whose side chain forms a lanthionine bridge
  MISC_FEATURE (14)..(14): Ala whose side chain forms a lanthionine bridge
SEICIWQDWGEHRATEA

SEQ ID NO: 502 - protein, 15 aa, Artificial Sequence
  compstatin analogue
  MISC_FEATURE (3)..(3): Cys whose side chain forms a lanthionine bridge
  MISC_FEATURE (13)..(13): Ala whose side chain forms a lanthionine bridge
EICIWQDWGEHRATE

SEQ ID NO: 503 - protein, 17 aa, Artificial Sequence
  compstatin analogue
  MISC_FEATURE (3)..(3): Cys whose side chain forms a lanthionine bridge
  MISC_FEATURE (13)..(13): Ala whose side chain forms a lanthionine bridge
EICIWQDWGEHRATEGE

SEQ ID NO: 504 - protein, 18 aa, Artificial Sequence
  compstatin analogue
  MISC_FEATURE (5)..(5): Cys whose side chain forms a lanthionine bridge
  MISC_FEATURE (15)..(15): Ala whose side chain forms a lanthionine bridge
EGEICIWQDWGEHRAEGE

SEQ ID NO: 505 - protein, 18 aa, Artificial Sequence
  compstatin analogue
  MISC_FEATURE (5)..(5): Cys whose side chain forms a lanthionine bridge
  MISC_FEATURE (15)..(15): Ala whose side chain forms a lanthionine bridge
ESEICIWQDWGEHRAEGE

SEQ ID NO: 506 - protein, 19 aa, Artificial Sequence
  compstatin analogue
  MISC_FEATURE (5)..(5): Cys whose side chain forms a lanthionine bridge
  MISC_FEATURE (15)..(15): Ala whose side chain forms a lanthionine bridge
KEKICIWQDWGEHRATEKE

SEQ ID NO: 507 - protein, 19 aa, Artificial Sequence
  compstatin analogue
  MISC_FEATURE (5)..(5): Cys whose side chain forms a lanthionine bridge
  MISC_FEATURE (15)..(15): Ala whose side chain forms a lanthionine bridge
EKGICIWQDWGEHRATEKP

SEQ ID NO: 508 - protein, 16 aa, Artificial Sequence
  compstatin analogue
  MISC_FEATURE (2)..(2): Cys whose side chain forms a lanthionine bridge
  MISC_FEATURE (12)..(12): Ala whose side chain forms a lanthionine bridge
ICIWQDWGEHRATEGK

SEQ ID NO: 509 - protein, 17 aa, Artificial Sequence
  compstatin analogue
  MISC_FEATURE (5)..(5): Cys whose side chain forms a lanthionine bridge
  MISC_FEATURE (15)..(15): Ala whose side chain forms a lanthionine bridge
  MISC_FEATURE (16)..(16): Xaa = Sar
GSAICIWQDWGEHRAXE

SEQ ID NO: 510 - protein, 16 aa, Artificial Sequence
  compstatin analogue
  MISC_FEATURE (4)..(4): Cys whose side chain forms a lanthionine bridge
  MISC_FEATURE (14)..(14): Ala whose side chain forms a lanthionine bridge
  MISC_FEATURE (15)..(15): Xaa = Sar
SAICIWQDWGEHRAXE

SEQ ID NO: 511 - protein, 17 aa, Artificial Sequence
  compstatin analogue
  MISC_FEATURE (4)..(4): Cys whose side chain forms a lanthionine bridge
  MISC_FEATURE (14)..(14): Ala whose side chain forms a lanthionine bridge
SAICIWQDWGEHRATEG

SEQ ID NO: 512 - protein, 16 aa, Artificial Sequence
  compstatin analogue
  MISC_FEATURE (2)..(2): Cys whose side chain forms a lanthionine bridge
  MISC_FEATURE (12)..(12): Ala whose side chain forms a lanthionine bridge
FCIWQDWGEHRATGAE

SEQ ID NO: 513 - protein, 20 aa, Artificial Sequence
  compstatin analogue
  MISC_FEATURE (6)..(6): Cys whose side chain forms a lanthionine bridge
  MISC_FEATURE (16)..(16): Ala whose side chain forms a lanthionine bridge
  MISC_FEATURE (17)..(17): Xaa = Sar
EGSAICIWQDWGEHRAXEGE

SEQ ID NO: 514 - protein, 18 aa, Artificial Sequence
  compstatin analogue
  MISC_FEATURE (6)..(6): Cys whose side chain forms a lanthionine bridge
  MISC_FEATURE (16)..(16): Ala whose side chain forms a lanthionine bridge
  MISC_FEATURE (17)..(17): Xaa = Sar
EGSAFCIWQDWGEHRAXE

SEQ ID NO: 515 - protein, 17 aa, Artificial Sequence
  compstatin analogue
  MISC_FEATURE (6)..(6): Cys whose side chain forms a lanthionine bridge
  MISC_FEATURE (16)..(16): Ala whose side chain forms a lanthionine bridge
ESSAICIWQDWGAHRAT

SEQ ID NO: 516 - protein, 17 aa, Artificial Sequence
  compstatin analogue
  MISC_FEATURE (2)..(2): Cys whose side chain forms a lanthionine bridge
  MISC_FEATURE (12)..(12): Ala whose side chain forms a lanthionine bridge
ICIWQDWGAHRATGAES

SEQ ID NO: 517 - protein, 14 aa, Artificial Sequence
  compstatin analogue
  MISC_FEATURE (1)..(1): Xaa = d-tyrosene
  MISC_FEATURE (3)..(3): Cys whose side chain forms a lanthionine bridge
  MISC_FEATURE (5)..(5): Xaa = 1-Me-Trp
  MISC_FEATURE (9)..(9): Xaa = Sar
  MISC_FEATURE (13)..(13): Ala whose side chain forms a lanthionine bridge
  MISC_FEATURE (14)..(14): Xaa = N-Me-Ile
XICIXQDWXAHRAX

SEQ ID NO: 518 - protein, 18 aa, Artificial Sequence
  compstatin analogue
  MISC_FEATURE (6)..(6): Cys whose side chain forms a lanthionine bridge
  MISC_FEATURE (8)..(8): Xaa = 1-Me-Trp
  MISC_FEATURE (16)..(16): Ala whose side chain forms a lanthionine bridge
  MISC_FEATURE (17)..(17): Xaa = Sar
EGSAICIXQDWGEHRAXE

SEQ ID NO: 519 - protein, 18 aa, Artificial Sequence
  compstatin analogue
  MISC_FEATURE (6)..(6): Cys whose side chain forms a lanthionine bridge
  MISC_FEATURE (8)..(8): Xaa = 2-Nal
  MISC_FEATURE (16)..(16): Ala whose side chain forms a lanthionine bridge
  MISC_FEATURE (17)..(17): Xaa = Sar
EGSAICIXQDWGEHRAXE

SEQ ID NO: 520 - protein, 17 aa, Artificial Sequence
  compstatin analogue
  MISC_FEATURE (2)..(2): Cys whose side chain forms a lanthionine bridge
  MISC_FEATURE (4)..(4): Xaa = 1-Me-Trp
  MISC_FEATURE (12)..(12): Ala whose side chain forms a lanthionine bridge
ICIXQDWGEHRATGAES

SEQ ID NO: 521 - protein, 17 aa, Artificial Sequence
  compstatin analogue
  MISC_FEATURE (2)..(2): Cys whose side chain forms a lanthionine bridge
  MISC_FEATURE (4)..(4): Xaa = 2-Nal
  MISC_FEATURE (12)..(12): Ala whose side chain forms a lanthionine bridge
ICIXQDWGEHRATGAES

SEQ ID NO: 522 - protein, 18 aa, Artificial Sequence
  compstatin analogue
  MISC_FEATURE (6)..(6): Cys whose side chain forms a lanthionine bridge
  MISC_FEATURE (8)..(8): Xaa = 1-Me-Trp
  MISC_FEATURE (16)..(16): Ala whose side chain forms a lanthionine bridge
  MISC_FEATURE (17)..(17): Xaa = Sar
EGSAFCIXQDWGEHRAXE

SEQ ID NO: 523 - protein, 18 aa, Artificial Sequence
  compstatin analogue
  MISC_FEATURE (6)..(6): Cys whose side chain forms a lanthionine bridge
  MISC_FEATURE (8)..(8): Xaa = 1-Me-Trp
  MISC_FEATURE (16)..(16): Ala whose side chain forms a lanthionine bridge
  MISC_FEATURE (17)..(17): Xaa = Sar
EGSAYCIXQDWGEHRAXE

SEQ ID NO: 524 - protein, 18 aa, Artificial Sequence
  compstatin analogue
  MISC_FEATURE (6)..(6): Cys whose side chain forms a lanthionine bridge
  MISC_FEATURE (16)..(16): Ala whose side chain forms a lanthionine bridge
EGSAICIWQDWGEHRATE

SEQ ID NO: 525 - protein, 18 aa, Artificial Sequence
  compstatin analogue
  MISC_FEATURE (6)..(6): Cys whose side chain forms a lanthionine bridge
  MISC_FEATURE (8)..(8): Xaa =  1-Nal
  MISC_FEATURE (16)..(16): Ala whose side chain forms a lanthionine bridge
EGSAFCIXQDWGEHRATE

SEQ ID NO: 526 - protein, 18 aa, Artificial Sequence
  compstatin analogue
  MISC_FEATURE (6)..(6): Cys whose side chain forms a lanthionine bridge
  MISC_FEATURE (8)..(8): Xaa = 1-Me-Trp
  MISC_FEATURE (16)..(16): Ala whose side chain forms a lanthionine bridge
EGSAFCIXQDWGEHRATE

SEQ ID NO: 527 - protein, 19 aa, Artificial Sequence
  compstatin analogue
  MISC_FEATURE (6)..(6): Cys whose side chain forms a lanthionine bridge
  MISC_FEATURE (8)..(8): Xaa = 1-Me-Trp
  MISC_FEATURE (16)..(16): Ala whose side chain forms a lanthionine bridge
EGSAFCIXQDWGEHRAEGE

SEQ ID NO: 528 - protein, 18 aa, Artificial Sequence
  compstatin analogue
  MISC_FEATURE (6)..(6): Cys whose side chain forms a lanthionine bridge
  MISC_FEATURE (8)..(8): Xaa = 1-Me-Trp
  MISC_FEATURE (16)..(16): Ala whose side chain forms a lanthionine bridge
EGSAYCIXQDWGEHRATE

SEQ ID NO: 529 - protein, 18 aa, Artificial Sequence
  compstatin analogue
  MISC_FEATURE (6)..(6): Cys whose side chain forms a lanthionine bridge
  MISC_FEATURE (8)..(8): Xaa = 2-Nal
  MISC_FEATURE (16)..(16): Ala whose side chain forms a lanthionine bridge
EGSAFCIXQDWGEHRATE

SEQ ID NO: 530 - protein, 17 aa, Artificial Sequence
  compstatin analogue
  MISC_FEATURE (2)..(2): Cys whose side chain forms a lanthionine bridge
  MISC_FEATURE (4)..(4): Xaa = 2-Nal
  MISC_FEATURE (12)..(12): Ala whose side chain forms a lanthionine bridge
FCIXQDWGEHRATGAES

SEQ ID NO: 531 - protein, 17 aa, Artificial Sequence
  compstatin analogue
  MISC_FEATURE (2)..(2): Cys whose side chain forms a lanthionine bridge
  MISC_FEATURE (4)..(4): Xaa = 1-Me-Trp
  MISC_FEATURE (12)..(12): Ala whose side chain forms a lanthionine bridge
YCIXQDWGEHRATGAES

SEQ ID NO: 532 - protein, 17 aa, Artificial Sequence
  compstatin analogue
  MISC_FEATURE (2)..(2): Cys whose side chain forms a lanthionine bridge
  MISC_FEATURE (4)..(4): Xaa = 1-Nal
  MISC_FEATURE (12)..(12): Ala whose side chain forms a lanthionine bridge
FCIXQDWGEHRATGAES

SEQ ID NO: 533 - protein, 17 aa, Artificial Sequence
  compstatin analogue
  MISC_FEATURE (2)..(2): Cys whose side chain forms a lanthionine bridge
  MISC_FEATURE (4)..(4): Xaa = 2-Nal
  MISC_FEATURE (12)..(12): Ala whose side chain forms a lanthionine bridge
FCIXQDWGEHRATGAES

SEQ ID NO: 534 - protein, 17 aa, Artificial Sequence
  compstatin analogue
  MISC_FEATURE (2)..(2): Cys whose side chain forms a lanthionine bridge
  MISC_FEATURE (4)..(4): Xaa = 2-Nal
  MISC_FEATURE (12)..(12): Ala whose side chain forms a lanthionine bridge
YCIXQDWGEHRATGAES

SEQ ID NO: 535 - protein, 17 aa, Artificial Sequence
  compstatin analogue
  MISC_FEATURE (2)..(2): Cys whose side chain forms a lanthionine bridge
  MISC_FEATURE (12)..(12): Ala whose side chain forms a lanthionine bridge
YCIWQDWGEHRATGAES

SEQ ID NO: 536 - protein, 19 aa, Artificial Sequence
  compstatin analogue
  MISC_FEATURE (4)..(4): Cys whose side chain forms a lanthionine bridge
  MISC_FEATURE (6)..(6): Xaa = 2-Me-Trp
  MISC_FEATURE (14)..(14): Ala whose side chain forms a lanthionine bridge
SEFCIXQDWGEHRATGAES

SEQ ID NO: 537 - protein, 17 aa, Artificial Sequence
  compstatin analogue
  MISC_FEATURE (2)..(2): Cys whose side chain forms a lanthionine bridge
  MISC_FEATURE (4)..(4): Xaa = 1-Me-Trp
  MISC_FEATURE (12)..(12): Ala whose side chain forms a lanthionine bridge
YCIXQDWGEHRATEAGS

SEQ ID NO: 538 - protein, 17 aa, Artificial Sequence
  compstatin analogue
  MISC_FEATURE (2)..(2): Cys whose side chain forms a lanthionine bridge
  MISC_FEATURE (4)..(4): Xaa = 1-Me-Trp
  MISC_FEATURE (12)..(12): Ala whose side chain forms a lanthionine bridge
YCIXQDWGEHRATESGA

SEQ ID NO: 539 - protein, 18 aa, Artificial Sequence
  compstatin analogue
  MISC_FEATURE (6)..(6): Cys whose side chain forms a lanthionine bridge
  MISC_FEATURE (8)..(8): Xaa = 1-Me-Trp
  MISC_FEATURE (16)..(16): Ala whose side chain forms a lanthionine bridge
  MISC_FEATURE (17)..(17): Xaa = Sar
EGSAYCIXQEWGEHRAXE

SEQ ID NO: 540 - protein, 17 aa, Artificial Sequence
  compstatin analogue
  MISC_FEATURE (4)..(4): Cys whose side chain forms a lanthionine bridge
  MISC_FEATURE (6)..(6): Xaa = 1-Me-Trp
  MISC_FEATURE (14)..(14): Ala whose side chain forms a lanthionine bridge
  MISC_FEATURE (15)..(15): Xaa = Sar
SEYCIXQDWGEHRAXEA

SEQ ID NO: 541 - protein, 17 aa, Artificial Sequence
  compstatin analogue
  MISC_FEATURE (2)..(2): Cys whose side chain forms a lanthionine bridge
  MISC_FEATURE (4)..(4): Xaa = 1-Me-Trp
  MISC_FEATURE (8)..(8): Xaa = Sar
  MISC_FEATURE (12)..(12): Ala whose side chain forms a lanthionine bridge
FCIXQDWXEHRATGAES

SEQ ID NO: 542 - protein, 18 aa, Artificial Sequence
  compstatin analogue
  MISC_FEATURE (1)..(1): Xaa = d-Tyrosene
  MISC_FEATURE (3)..(3): Cys whose side chain forms a lanthionine bridge
  MISC_FEATURE (5)..(5): Xaa = 1-Me-Trp
  MISC_FEATURE (9)..(9): Xaa = Sar
  MISC_FEATURE (13)..(13): Ala whose side chain forms a lanthionine bridge
XFCIXQDWXEHRATGAES

SEQ ID NO: 543 - protein, 19 aa, Artificial Sequence
  compstatin analogue
  MISC_FEATURE (4)..(4): Cys whose side chain forms a lanthionine bridge
  MISC_FEATURE (6)..(6): Xaa = 1-Me-Trp
  MISC_FEATURE (14)..(14): Ala whose side chain forms a lanthionine bridge
  MISC_FEATURE (15)..(15): Xaa = Sar
SEFCIXQDWGEHRAXGAES

SEQ ID NO: 544 - protein, 17 aa, Artificial Sequence
  compstatin analogue
  MISC_FEATURE (4)..(4): Cys whose side chain forms a lanthionine bridge
  MISC_FEATURE (6)..(6): Xaa = 1-Me-Trp
  MISC_FEATURE (14)..(14): Ala whose side chain forms a lanthionine bridge
  MISC_FEATURE (15)..(15): Xaa = Sar
SEFCIXQDWGEHRAXEA

SEQ ID NO: 545 - protein, 17 aa, Artificial Sequence
  compstatin analogue
  MISC_FEATURE (4)..(4): Cys whose side chain forms a lanthionine bridge
  MISC_FEATURE (6)..(6): Xaa = 1-Me-Trp
  MISC_FEATURE (10)..(10): Xaa = Sar
  MISC_FEATURE (14)..(14): Ala whose side chain forms a lanthionine bridge
  MISC_FEATURE (15)..(15): Xaa = Sar
SEFCIXQDWXEHRAXEA

SEQ ID NO: 546 - protein, 17 aa, Artificial Sequence
  compstatin analogue
  MISC_FEATURE (4)..(4): Cys whose side chain forms a lanthionine bridge
  MISC_FEATURE (6)..(6): Xaa = 1-Me-Trp
  MISC_FEATURE (10)..(10): Xaa = Sar
  MISC_FEATURE (14)..(14): Ala whose side chain forms a lanthionine bridge
SEFCIXQDWXEHRATEA

SEQ ID NO: 547 - protein, 16 aa, Artificial Sequence
  compstatin analogue
  MISC_FEATURE (4)..(4): Cys whose side chain forms a lanthionine bridge
  MISC_FEATURE (6)..(6): Xaa = 1-Me-Trp
  MISC_FEATURE (14)..(14): Ala whose side chain forms a lanthionine bridge
  MISC_FEATURE (15)..(15): Xaa = Sar
SEFCIXQDWGEHRAXE

SEQ ID NO: 548 - protein, 16 aa, Artificial Sequence
  compstatin analogue
  MISC_FEATURE (4)..(4): Cys whose side chain forms a lanthionine bridge
  MISC_FEATURE (6)..(6): Xaa = 1-Me-Trp
  MISC_FEATURE (10)..(10): Xaa = Sar
  MISC_FEATURE (14)..(14): Ala whose side chain forms a lanthionine bridge
  MISC_FEATURE (15)..(15): Xaa = Sar
SEFCIXQDWXEHRAXE

SEQ ID NO: 549 - protein, 16 aa, Artificial Sequence
  compstatin analogue
  MISC_FEATURE (3)..(3): Cys whose side chain forms a lanthionine bridge
  MISC_FEATURE (5)..(5): Xaa = 1-Me-Trp
  MISC_FEATURE (13)..(13): Ala whose side chain forms a lanthionine bridge
  MISC_FEATURE (14)..(14): Xaa = Sar
EFCIXQDWGEHRAXEA

SEQ ID NO: 550 - protein, 17 aa, Artificial Sequence
  compstatin analogue
  MISC_FEATURE (3)..(3): Xaa = Sar
  MISC_FEATURE (4)..(4): Cys whose side chain forms a lanthionine bridge
  MISC_FEATURE (6)..(6): Xaa = 1-Me-Trp
  MISC_FEATURE (14)..(14): Ala whose side chain forms a lanthionine bridge
  MISC_FEATURE (15)..(15): Xaa = Sar
SEXCIXQDWGEHRAXEA

SEQ ID NO: 551 - protein, 17 aa, Artificial Sequence
  compstatin analogue
  MISC_FEATURE (3)..(3): Xaa = Sar
  MISC_FEATURE (4)..(4): Cys whose side chain forms a lanthionine bridge
  MISC_FEATURE (6)..(6): Xaa = 1-Me-Trp
  MISC_FEATURE (14)..(14): Ala whose side chain forms a lanthionine bridge
SEXCIXQDWGEHRATEA

SEQ ID NO: 552 - protein, 17 aa, Artificial Sequence
  compstatin analogue
  MISC_FEATURE (4)..(4): Cys whose side chain forms a lanthionine bridge
  MISC_FEATURE (6)..(6): Xaa = 1-Me-Trp
  MISC_FEATURE (14)..(14): Ala whose side chain forms a lanthionine bridge
  MISC_FEATURE (15)..(15): Xaa = Sar
SEFCIXQEWGEHRAXEA

SEQ ID NO: 553 - protein, 17 aa, Artificial Sequence
  compstatin analogue
  MISC_FEATURE (4)..(4): Cys whose side chain forms a lanthionine bridge
  MISC_FEATURE (6)..(6): Xaa = 1-Me-Trp
  MISC_FEATURE (14)..(14): Ala whose side chain forms a lanthionine bridge
SEFCIXQDWGEHRASEA

SEQ ID NO: 554 - protein, 15 aa, Artificial Sequence
  compstatin analogue
  MISC_FEATURE (3)..(3): Cys whose side chain forms a lanthionine bridge
  MISC_FEATURE (5)..(5): Xaa = 1-Me-Trp
  MISC_FEATURE (13)..(13): Ala whose side chain forms a lanthionine bridge
EFCIXQDWGEHRAES

SEQ ID NO: 555 - protein, 17 aa, Artificial Sequence
  compstatin analogue
  MISC_FEATURE (4)..(4): Cys whose side chain forms a lanthionine bridge
  MISC_FEATURE (6)..(6): Xaa = 1-Me-Trp
  MISC_FEATURE (14)..(14): Ala whose side chain forms a lanthionine bridge
  MISC_FEATURE (15)..(15): Xaa = Sar
SEFCIXQDWGEHKAXEA

SEQ ID NO: 556 - protein, 17 aa, Artificial Sequence
  compstatin analogue
  MISC_FEATURE (4)..(4): Cys whose side chain forms a lanthionine bridge
  MISC_FEATURE (6)..(6): Xaa = 1-Me-Trp
  MISC_FEATURE (14)..(14): Ala whose side chain forms a lanthionine bridge
  MISC_FEATURE (15)..(15): Xaa = Sar
GEFCIXQDWGEHRAXEA

SEQ ID NO: 557 - protein, 17 aa, Artificial Sequence
  compstatin analogue
  MISC_FEATURE (3)..(3): Xaa = Sar
  MISC_FEATURE (4)..(4): Cys whose side chain forms a lanthionine bridge
  MISC_FEATURE (6)..(6): Xaa = 1-Me-Trp
  MISC_FEATURE (14)..(14): Ala whose side chain forms a lanthionine bridge
GEXCIXQDWGEHRATEA

SEQ ID NO: 558 - protein, 17 aa, Artificial Sequence
  compstatin analogue
  MISC_FEATURE (3)..(3): Xaa = Sar
  MISC_FEATURE (4)..(4): Cys whose side chain forms a lanthionine bridge
  MISC_FEATURE (6)..(6): Xaa = 1-Me-Trp
  MISC_FEATURE (10)..(10): Xaa = Sar
  MISC_FEATURE (14)..(14): Ala whose side chain forms a lanthionine bridge
SEXCIXQEWXEHRATEA

SEQ ID NO: 559 - protein, 17 aa, Artificial Sequence
  compstatin analogue
  MISC_FEATURE (3)..(3): Xaa = Sar
  MISC_FEATURE (4)..(4): Cys whose side chain forms a lanthionine bridge
  MISC_FEATURE (6)..(6): Xaa = 1-Me-Trp
  MISC_FEATURE (14)..(14): Ala whose side chain forms a lanthionine bridge
  MISC_FEATURE (15)..(15): Xaa = Sar
SEXCIXQEWGEHRAXEA

SEQ ID NO: 560 - protein, 16 aa, Artificial Sequence
  compstatin analogue
  MISC_FEATURE (1)..(1): Xaa = d-tyrosene
  MISC_FEATURE (2)..(2): Xaa = Sar
  MISC_FEATURE (3)..(3): Cys whose side chain forms a lanthionine bridge
  MISC_FEATURE (5)..(5): Xaa = 1-Me-Trp
  MISC_FEATURE (13)..(13): Ala whose side chain forms a lanthionine bridge
XXCIXQDWGEHRATEA

SEQ ID NO: 561 - protein, 20 aa, Artificial Sequence
  compstatin analogue
  MISC_FEATURE (1)..(1): Xaa = a lysine residue covalently linked to a lipophilic group via its side chain
  MISC_FEATURE (6)..(6): Xaa = any amino acid whose side chain is linked by a thioether bond
  MISC_FEATURE (16)..(16): Xaa = any amino acid whose side chain is linked by a thioether bond
XGSAIXIWQDWGEHRXTEGE

SEQ ID NO: 562 - protein, 21 aa, Artificial Sequence
  compstatin analogue
  MISC_FEATURE (6)..(6): Xaa = any amino acid whose side chain is linked by a thioether bond
  MISC_FEATURE (8)..(8): Xaa = 1-Me-Trp
  MISC_FEATURE (16)..(16): Xaa = any amino acid whose side chain is linked by a thioether bond
  MISC_FEATURE (17)..(17): Xaa = Sar
  MISC_FEATURE (21)..(21): Xaa = a lysine residue covalently linked to a lipophilic group via its side chain
ASGEYXIXQDWGEHRXXEGEX

SEQ ID NO: 563 - protein, 17 aa, Artificial Sequence
  compstatin analogue
  MISC_FEATURE (3)..(3): Xaa = any amino acid whose side chain is linked by a thioether bond
  MISC_FEATURE (5)..(5): Xaa = 1-Me-Trp
  MISC_FEATURE (13)..(13): Xaa = any amino acid whose side chain is linked by a thioether bond
  MISC_FEATURE (17)..(17): Xaa = a lysine residue covalently linked to a lipophilic group via its side chain
EFXIXQDWGEHRXEGEX

SEQ ID NO: 564 - protein, 20 aa, Artificial Sequence
  compstatin analogue
  MISC_FEATURE (6)..(6): Xaa = any amino acid whose side chain is linked by a thioether bond
  MISC_FEATURE (16)..(16): Xaa = any amino acid whose side chain is linked by a thioether bond
  MISC_FEATURE (20)..(20): Xaa = a lysine residue covalently linked to a lipophilic group via its side chain
EGSAIXIWQDWGEHRXTEGX

SEQ ID NO: 565 - protein, 18 aa, Artificial Sequence
  compstatin analogue
  MISC_FEATURE (6)..(6): Xaa = any amino acid whose side chain is linked by a thioether bond
  MISC_FEATURE (8)..(8): Xaa = 1-Me-Trp
  MISC_FEATURE (15)..(15): Xaa = a lysine residue covalently linked to a lipophilic group via its side chain
  MISC_FEATURE (16)..(16): Xaa = any amino acid whose side chain is linked by a thioether bond
  MISC_FEATURE (17)..(17): Xaa = Sar
EGSAYXIXQDWGEHXXXE

SEQ ID NO: 566 - protein, 20 aa, Artificial Sequence
  compstatin analogue
  MISC_FEATURE (6)..(6): Xaa = any amino acid whose side chain is linked by a thioether bond
  MISC_FEATURE (8)..(8): Xaa = 1-Me-Trp
  MISC_FEATURE (16)..(16): Xaa = any amino acid whose side chain is linked by a thioether bond
  MISC_FEATURE (17)..(17): Xaa = Sar
  MISC_FEATURE (20)..(20): Xaa = a lysine residue covalently linked to a lipophilic group via its side chain
EGSAYXIXQDWGEHRXXEGX

SEQ ID NO: 567 - protein, 21 aa, Artificial Sequence
  compstatin analogue
  MISC_FEATURE (6)..(6): Xaa = any amino acid whose side chain is linked by a thioether bond
  MISC_FEATURE (8)..(8): Xaa = 1-Me-Trp
  MISC_FEATURE (16)..(16): Xaa = any amino acid whose side chain is linked by a thioether bond
  MISC_FEATURE (17)..(17): Xaa = Sar
  MISC_FEATURE (21)..(21): Xaa = a lysine residue covalently linked to a lipophilic group via its side chain
EGSAYXIXQDWGEHRXXEGEX

SEQ ID NO: 568 - protein, 21 aa, Artificial Sequence
  compstatin analogue
  MISC_FEATURE (6)..(6): Xaa = any amino acid whose side chain is linked by a thioether bond
  MISC_FEATURE (8)..(8): Xaa = 1-Me-Trp
  MISC_FEATURE (16)..(16): Xaa = any amino acid whose side chain is linked by a thioether bond
  MISC_FEATURE (17)..(17): Xaa = Sar
  MISC_FEATURE (21)..(21): Xaa = a lysine residue covalently linked to a lipophilic group via its side chain
EGSAYXIXQDWGEHRXXEGKX

SEQ ID NO: 569 - protein, 21 aa, Artificial Sequence
  compstatin analogue
  MISC_FEATURE (6)..(6): Xaa = any amino acid whose side chain is linked by a thioether bond
  MISC_FEATURE (8)..(8): Xaa = 1-Me-Trp
  MISC_FEATURE (16)..(16): Xaa = any amino acid whose side chain is linked by a thioether bond
  MISC_FEATURE (17)..(17): Xaa = Sar
  MISC_FEATURE (20)..(20): Xaa = gammaGlu
  MISC_FEATURE (21)..(21): Xaa = a lysine residue covalently linked to a lipophilic group via its side chain
EGSAYXIXQDWGEHRXXEKXX

SEQ ID NO: 570 - protein, 18 aa, Artificial Sequence
  compstatin analogue
  MISC_FEATURE (2)..(2): Xaa = any amino acid whose side chain is linked by a thioether bond
  MISC_FEATURE (4)..(4): Xaa = 1-Me-Trp
  MISC_FEATURE (12)..(12): Xaa = any amino acid whose side chain is linked by a thioether bond
  MISC_FEATURE (18)..(18): Xaa = a lysine residue covalently linked to a lipophilic group via its side chain
FXIXQDWGEHRXTGAESX

SEQ ID NO: 571 - protein, 16 aa, Artificial Sequence
  compstatin analogue
  MISC_FEATURE (2)..(2): Xaa = any amino acid whose side chain is linked by a thioether bond
  MISC_FEATURE (12)..(12): Xaa = any amino acid whose side chain is linked by a thioether bond
  MISC_FEATURE (16)..(16): Xaa = a lysine residue covalently linked to a lipophilic group via its side chain
IXIWQDWGEHRXTEGX

SEQ ID NO: 572 - protein, 17 aa, Artificial Sequence
  compstatin analogue
  MISC_FEATURE (2)..(2): Xaa = any amino acid whose side chain is linked by a thioether bond
  MISC_FEATURE (12)..(12): Xaa = any amino acid whose side chain is linked by a thioether bond
  MISC_FEATURE (17)..(17): Xaa = a lysine residue covalently linked to a lipophilic group via its side chain
IXIWQDWGEHRXTEGEX

SEQ ID NO: 573 - protein, 17 aa, Artificial Sequence
  compstatin analogue
  MISC_FEATURE (4)..(4): Xaa = any amino acid whose side chain is linked by a thioether bond
  MISC_FEATURE (6)..(6): Xaa = 1-Me-Trp
  MISC_FEATURE (14)..(14): Xaa = any amino acid whose side chain is linked by a thioether bond
  MISC_FEATURE (15)..(15): Xaa = Sar
  MISC_FEATURE (17)..(17): Xaa = a lysine residue covalently linked to a lipophilic group via its side chain
SAYXIXQDWGEHRXXEX

SEQ ID NO: 574 - protein, 19 aa, Artificial Sequence
  compstatin analogue
  MISC_FEATURE (4)..(4): Xaa = any amino acid whose side chain is linked by a thioether bond
  MISC_FEATURE (6)..(6): Xaa = 1-Me-Trp
  MISC_FEATURE (14)..(14): Xaa = any amino acid whose side chain is linked by a thioether bond
  MISC_FEATURE (15)..(15): Xaa = Sar
  MISC_FEATURE (19)..(19): Xaa = a lysine residue covalently linked to a lipophilic group via its side chain
SEFXIXQDWGEHRXXEGAX

SEQ ID NO: 575 - protein, 21 aa, Artificial Sequence
  compstatin analogue
  MISC_FEATURE (4)..(4): Xaa = any amino acid whose side chain is linked by a thioether bond
  MISC_FEATURE (6)..(6): Xaa = 1-Me-Trp
  MISC_FEATURE (14)..(14): Xaa = any amino acid whose side chain is linked by a thioether bond
  MISC_FEATURE (15)..(15): Xaa = Sar
  MISC_FEATURE (19)..(20): Xaa = Peg3
  MISC_FEATURE (21)..(21): Xaa = a lysine residue covalently linked to a lipophilic group via its side chain
SEFXIXQDWGEHRXXEGEXXX

SEQ ID NO: 576 - protein, 22 aa, Artificial Sequence
  compstatin analogue
  MISC_FEATURE (4)..(4): Xaa = any amino acid whose side chain is linked by a thioether bond
  MISC_FEATURE (6)..(6): Xaa = 1-Me-Trp
  MISC_FEATURE (14)..(14): Xaa = any amino acid whose side chain is linked by a thioether bond
  MISC_FEATURE (15)..(15): Xaa = Sar
  MISC_FEATURE (22)..(22): Xaa = a lysine residue covalently linked to a lipophilic group via its side chain
SEFXIXQDWGEHRXXEGEGGGX

SEQ ID NO: 577 - protein, 20 aa, Artificial Sequence
  compstatin analogue
  MISC_FEATURE (4)..(4): Xaa = any amino acid whose side chain is linked by a thioether bond
  MISC_FEATURE (6)..(6): Xaa = 1-Me-Trp
  MISC_FEATURE (14)..(14): Xaa = any amino acid whose side chain is linked by a thioether bond
  MISC_FEATURE (15)..(15): Xaa = Sar
  MISC_FEATURE (19)..(19): Xaa = Peg3
  MISC_FEATURE (20)..(20): Xaa = a lysine residue covalently linked to a lipophilic group via its side chain
SEFXIXQDWGEHRXXEGEXX

SEQ ID NO: 578 - protein, 22 aa, Artificial Sequence
  compstatin analogue
  MISC_FEATURE (4)..(4): Xaa = any amino acid whose side chain is linked by a thioether bond
  MISC_FEATURE (6)..(6): Xaa = 1-Me-Trp
  MISC_FEATURE (14)..(14): Xaa = any amino acid whose side chain is linked by a thioether bond
  MISC_FEATURE (15)..(15): Xaa = Sar
  MISC_FEATURE (19)..(19): Xaa = Peg3
  MISC_FEATURE (22)..(22): Xaa = a lysine residue covalently linked to a lipophilic group via its side chain
SEFXIXQDWGEHRXXEGEXESX

SEQ ID NO: 579 - protein, 22 aa, Artificial Sequence
  compstatin analogue
  MISC_FEATURE (4)..(4): Xaa = any amino acid whose side chain is linked by a thioether bond
  MISC_FEATURE (6)..(6): Xaa = 1-Me-Trp
  MISC_FEATURE (14)..(14): Xaa = any amino acid whose side chain is linked by a thioether bond
  MISC_FEATURE (15)..(15): Xaa = Sar
  MISC_FEATURE (22)..(22): Xaa = a lysine residue covalently linked to a lipophilic group via its side chain
SEFXIXQDWGEHRXXEGESESX

SEQ ID NO: 580 - protein, 22 aa, Artificial Sequence
  compstatin anaogue
  MISC_FEATURE (4)..(4): Xaa = any amino acid whose side chain is linked by a thioether bond
  MISC_FEATURE (6)..(6): Xaa = 1-Me-Trp
  MISC_FEATURE (14)..(14): Xaa = any amino acid whose side chain is linked by a thioether bond
  MISC_FEATURE (15)..(15): Xaa = Sar
  MISC_FEATURE (18)..(18): Xaa = gammaGlu
  MISC_FEATURE (22)..(22): Xaa = a lysine residue covalently linked to a lipophilic group via its side chain
SEFXIXQDWGEHRXXEKXGGGX

SEQ ID NO: 581 - protein, 20 aa, Artificial Sequence
  compstatin analogue
  MISC_FEATURE (4)..(4): Xaa = any amino acid whose side chain is linked by a thioether bond
  MISC_FEATURE (6)..(6): Xaa = 1-Me-Trp
  MISC_FEATURE (14)..(14): Xaa = any amino acid whose side chain is linked by a thioether bond
  MISC_FEATURE (19)..(19): Xaa = 8-aminooctanoyl
  MISC_FEATURE (20)..(20): Xaa = a lysine residue covalently linked to a lipophilic group via its side chain
SEFXIXQDWGEHRXTEGEXX

SEQ ID NO: 582 - protein, 21 aa, Artificial Sequence
  compstatin analogue
  MISC_FEATURE (4)..(4): Xaa = any amino acid whose side chain is linked by a thioether bond
  MISC_FEATURE (6)..(6): Xaa = 1-Me-Trp
  MISC_FEATURE (14)..(14): Xaa = any amino acid whose side chain is linked by a thioether bond
  MISC_FEATURE (19)..(19): Xaa = 8-aminooctanoyl
  MISC_FEATURE (21)..(21): Xaa = a lysine residue covalently linked to a lipophilic group via its side chain
SEFXIXQDWGEHRXTEGEXEX

SEQ ID NO: 583 - protein, 22 aa, Artificial Sequence
  compstatin analogue
  MISC_FEATURE (4)..(4): Xaa = any amino acid whose side chain is linked by a thioether bond
  MISC_FEATURE (6)..(6): Xaa = 1-Me-Trp
  MISC_FEATURE (14)..(14): Xaa = any amino acid whose side chain is linked by a thioether bond
  MISC_FEATURE (22)..(22): Xaa = a lysine residue covalently linked to a lipophilic group via its side chain
SEFXIXQDWGEHRXTEGEGGGX

SEQ ID NO: 584 - protein, 22 aa, Artificial Sequence
  compstatin analogue
  MISC_FEATURE (4)..(4): Xaa = any amino acid whose side chain is linked by a thioether bond
  MISC_FEATURE (6)..(6): Xaa = 1-Me-Trp
  MISC_FEATURE (14)..(14): Xaa = any amino acid whose side chain is linked by a thioether bond
  MISC_FEATURE (19)..(19): Xaa = Peg3
  MISC_FEATURE (22)..(22): Xaa = a lysine residue covalently linked to a lipophilic group via its side chain
SEFXIXQDWGEHRXTEGEXESX

SEQ ID NO: 585 - protein, 21 aa, Artificial Sequence
  compstatin analogue
  MISC_FEATURE (4)..(4): Xaa = any amino acid whose side chain is linked by a thioether bond
  MISC_FEATURE (6)..(6): Xaa =1-Me-Trp
  MISC_FEATURE (14)..(14): Xaa = any amino acid whose side chain is linked by a thioether bond
  MISC_FEATURE (19)..(20): Xaa = Peg3
  MISC_FEATURE (21)..(21): Xaa = a lysine residue covalently linked to a lipophilic group via its side chain
SEFXIXQDWGEHRXTEGEXXX

SEQ ID NO: 586 - protein, 22 aa, Artificial Sequence
  compstatin analogue
  MISC_FEATURE (4)..(4): Xaa = any amino acid whose side chain is linked by a thioether bond
  MISC_FEATURE (6)..(6): Xaa = 1-Me-Trp
  MISC_FEATURE (14)..(14): Xaa = any amino acid whose side chain is linked by a thioether bond
  MISC_FEATURE (18)..(18): Xaa = gammaGlu
  MISC_FEATURE (22)..(22): Xaa = a lysine residue covalently linked to a lipophilic group via its side chain
SEFXIXQDWGEHRXTEKXGGGX

SEQ ID NO: 587 - protein, 20 aa, Artificial Sequence
  compstatin analogue
  MISC_FEATURE (4)..(4): Xaa = any amino acid whose side chain is linked by a thioether bond
  MISC_FEATURE (6)..(6): Xaa = 1-Me-Trp
  MISC_FEATURE (14)..(14): Xaa = any amino acid whose side chain is linked by a thioether bond
  MISC_FEATURE (20)..(20): Xaa = a lysine residue covalently linked to a lipophilic group via its side chain
SEFXIXQDWGEHRXTGAESX

SEQ ID NO: 588 - protein, 19 aa, Artificial Sequence
  compstatin analogue
  MISC_FEATURE (4)..(4): Xaa = any amino acid whose side chain is linked by a thioether bond
  MISC_FEATURE (6)..(6): Xaa = 1-Me-Trp
  MISC_FEATURE (14)..(14): Xaa = any amino acid whose side chain is linked by a thioether bond
  MISC_FEATURE (15)..(15): Xaa = Sar
  MISC_FEATURE (19)..(19): Xaa = a lysine residue covalently linked to a lipophilic group via its side chain
SEFXIXQEWGEHRXXEGAX

SEQ ID NO: 589 - protein, 21 aa, Artificial Sequence
  compstatin analogue
  MISC_FEATURE (4)..(4): Xaa = any amino acid whose side chain is linked by a thioether bond
  MISC_FEATURE (6)..(6): Xaa = 1-Me-Trp
  MISC_FEATURE (14)..(14): Xaa = any amino acid whose side chain is linked by a thioether bond
  MISC_FEATURE (15)..(15): Xaa = Sar
  MISC_FEATURE (19)..(20): Xaa = Peg3
  MISC_FEATURE (21)..(21): Xaa = a lysine residue covalently linked to a lipophilic group via its side chain
SEFXIXQEWGEHRXXEGEXXX

SEQ ID NO: 590 - protein, 19 aa, Artificial Sequence
  compstatin analogue
  MISC_FEATURE (4)..(4): Xaa = any amino acid whose side chain is linked by a thioether bond
  MISC_FEATURE (6)..(6): Xaa = 1-Me-Trp
  MISC_FEATURE (14)..(14): Xaa = any amino acid whose side chain is linked by a thioether bond
  MISC_FEATURE (15)..(15): Xaa = Sar
  MISC_FEATURE (19)..(19): Xaa = a lysine residue covalently linked to a lipophilic group via its side chain
SEYXIXQDWGEHRXXEGAX

SEQ ID NO: 591 - protein, 21 aa, Artificial Sequence
  compstatin analogue
  MISC_FEATURE (4)..(4): Xaa = any amino acid whose side chain is linked by a thioether bond
  MISC_FEATURE (6)..(6): Xaa = 1-Me-Trp
  MISC_FEATURE (14)..(14): Xaa = any amino acid whose side chain is linked by a thioether bond
  MISC_FEATURE (15)..(15): Xaa = Sar
  MISC_FEATURE (19)..(20): Xaa = Peg3
  MISC_FEATURE (21)..(21): Xaa = a lysine residue covalently linked to a lipophilic group via its side chain
SEYXIXQDWGEHRXXEGEXXX

SEQ ID NO: 592 - protein, 19 aa, Artificial Sequence
  compstatin analogue
  MISC_FEATURE (4)..(4): Xaa = any amino acid whose side chain is linked by a thioether bond
  MISC_FEATURE (6)..(6): Xaa = 1-Me-Trp
  MISC_FEATURE (14)..(14): Xaa = any amino acid whose side chain is linked by a thioether bond
  MISC_FEATURE (15)..(15): Xaa = Sar
  MISC_FEATURE (19)..(19): Xaa = a lysine residue covalently linked to a lipophilic group via its side chain
SEYXIXQDWGEHRXXEGEX

SEQ ID NO: 593 - protein, 20 aa, Artificial Sequence
  compstatin analogue
  MISC_FEATURE (4)..(4): Xaa = any amino acid whose side chain is linked by a thioether bond
  MISC_FEATURE (6)..(6): Xaa = 1-Me-Trp
  MISC_FEATURE (10)..(10): Xaa = Sar
  MISC_FEATURE (14)..(14): Xaa = any amino acid whose side chain is linked by a thioether bond
  MISC_FEATURE (15)..(15): Xaa = Sar
  MISC_FEATURE (18)..(18): Xaa = gammaGlu
  MISC_FEATURE (20)..(20): Xaa = a lysine residue covalently linked to a lipophilic group via its side chain
SEYXIXQEWXEHRXXEKXAX

SEQ ID NO: 594 - protein, 19 aa, Artificial Sequence
  compstatin analogue
  MISC_FEATURE (4)..(4): Xaa = any amino acid whose side chain is linked by a thioether bond
  MISC_FEATURE (6)..(6): Xaa = 1-Me-Trp
  MISC_FEATURE (14)..(14): Xaa = any amino acid whose side chain is linked by a thioether bond
  MISC_FEATURE (15)..(15): Xaa = Sar
  MISC_FEATURE (19)..(19): Xaa = a lysine residue covalently linked to a lipophilic group via its side chain
SEYXIXQEWGEHRXXEGAX

SEQ ID NO: 595 - protein, 21 aa, Artificial Sequence
  compstatin analogue
  MISC_FEATURE (4)..(4): Xaa = any amino acid whose side chain is linked by a thioether bond
  MISC_FEATURE (6)..(6): Xaa = 1-Me-Trp
  MISC_FEATURE (14)..(14): Xaa = any amino acid whose side chain is linked by a thioether bond
  MISC_FEATURE (15)..(15): Xaa = Sar
  MISC_FEATURE (19)..(20): Xaa = Peg3
  MISC_FEATURE (21)..(21): Xaa = a lysine residue covalently linked to a lipophilic group via its side chain
SEYXIXQEWGEHRXXEGEXXX

SEQ ID NO: 596 - protein, 18 aa, Artificial Sequence
  compstatin analogue
  MISC_FEATURE (6)..(6): Xaa = any amino acid whose side chain is linked by a thioether bond
  MISC_FEATURE (8)..(8): Xaa = 1-Me-Trp
  MISC_FEATURE (16)..(16): Xaa = any amino acid whose side chain is linked by a thioether bond
  MISC_FEATURE (17)..(17): Xaa = Sar
EGSEYXIXQDWGEHRXXE

SEQ ID NO: 597 - protein, 20 aa, Artificial Sequence
  compstatin analogue
  MISC_FEATURE (6)..(6): Xaa = any amino acid whose side chain is linked by a thioether bond
  MISC_FEATURE (16)..(16): Xaa = any amino acid whose side chain is linked by a thioether bond
ESSAIXIWQDWGEHRXTEGE

SEQ ID NO: 598 - protein, 22 aa, Artificial Sequence
  compstatin analogue
  MISC_FEATURE (4)..(4): Xaa = any amino acid whose side chain is linked by a thioether bond
  MISC_FEATURE (6)..(6): Xaa = 1-Me-Trp
  MISC_FEATURE (14)..(14): Xaa = any amino acid whose side chain is linked by a thioether bond
  MISC_FEATURE (15)..(15): Xaa = Sar
  MISC_FEATURE (19)..(21): Xaa = Peg3
  MISC_FEATURE (22)..(22): Xaa = a lysine residue covalently linked to a lipophilic group via its side chain
SEFXIXQDWGEHRXXEGEXXXX

SEQ ID NO: 599 - protein, 19 aa, Artificial Sequence
  compstatin analogue
  MISC_FEATURE (4)..(4): Xaa = any amino acid whose side chain is linked by a thioether bond
  MISC_FEATURE (6)..(6): Xaa = 1-Me-Trp
  MISC_FEATURE (10)..(10): Xaa = Sar
  MISC_FEATURE (14)..(14): Xaa = any amino acid whose side chain is linked by a thioether bond
  MISC_FEATURE (15)..(15): Xaa = Sar
  MISC_FEATURE (17)..(18): Xaa = Peg3
  MISC_FEATURE (19)..(19): Xaa = a lysine residue covalently linked to a lipophilic group via its side chain
SEFXIXQDWXEHRXXEXXX

SEQ ID NO: 600 - protein, 19 aa, Artificial Sequence
  compstatin analogue
  MISC_FEATURE (3)..(3): Xaa = any amino acid whose side chain is linked by a thioether bond
  MISC_FEATURE (5)..(5): Xaa = 1-Me-Trp
  MISC_FEATURE (13)..(13): Xaa = any amino acid whose side chain is linked by a thioether bond
  MISC_FEATURE (14)..(14): Xaa = Sar
  MISC_FEATURE (17)..(18): Xaa = Peg3
  MISC_FEATURE (19)..(19): Xaa = a lysine residue covalently linked to a lipophilic group via its side chain
EFXIXQDWGEHRXXEAXXX

SEQ ID NO: 601 - protein, 21 aa, Artificial Sequence
  compstatin analogue
  MISC_FEATURE (4)..(4): Xaa = any amino acid whose side chain is linked by a thioether bond
  MISC_FEATURE (6)..(6): Xaa = 1-Me-Trp
  MISC_FEATURE (10)..(10): Xaa = Sar
  MISC_FEATURE (14)..(14): Xaa = any amino acid whose side chain is linked by a thioether bond
  MISC_FEATURE (15)..(15): Xaa = Sar
  MISC_FEATURE (19)..(20): Xaa = Peg3
  MISC_FEATURE (21)..(21): Xaa = a lysine residue covalently linked to a lipophilic group via its side chain
GEFXIXQDWXEHRXXEAEXXX

SEQ ID NO: 602 - protein, 22 aa, Artificial Sequence
  compstatin analogue
  MISC_FEATURE (4)..(4): Xaa = any amino acid whose side chain is linked by a thioether bond
  MISC_FEATURE (6)..(6): Xaa = 1-Me-Trp
  MISC_FEATURE (10)..(10): Xaa = Sar
  MISC_FEATURE (14)..(14): Xaa = any amino acid whose side chain is linked by a thioether bond
  misc_feature (15)..(15): Xaa = Sar
  misc_feature (19)..(19): Xaa = Peg3
  MISC_FEATURE (22)..(22): Xaa = a lysine residue covalently linked to a lipophilic group via its side chain
SEFXIXQDWXEHRXXEGEXESX

SEQ ID NO: 603 - protein, 22 aa, Artificial Sequence
  compstatin analogue
  MISC_FEATURE (4)..(4): Xaa = any amino acid whose side chain is linked by a thioether bond
  MISC_FEATURE (6)..(6): Xaa = 1-Me-Trp
  MISC_FEATURE (14)..(14): Xaa = any amino acid whose side chain is linked by a thioether bond
  MISC_FEATURE (15)..(15): Xaa = Sar
  MISC_FEATURE (19)..(19): Xaa = Peg3
  MISC_FEATURE (22)..(22): Xaa = a lysine residue covalently linked to a lipophilic group via its side chain
GEFXIXQEWGEHRXXEGEXESX

SEQ ID NO: 604 - protein, 19 aa, Artificial Sequence
  compstatin analogue
  MISC_FEATURE (3)..(3): Xaa = any amino acid whose side chain is linked by a thioether bond
  MISC_FEATURE (5)..(5): Xaa = 1-Me-Trp
  MISC_FEATURE (13)..(13): Xaa = any amino acid whose side chain is linked by a thioether bond
  MISC_FEATURE (14)..(14): Xaa = Sar
  MISC_FEATURE (17)..(18): Xaa = Peg3
  MISC_FEATURE (19)..(19): Xaa = a lysine residue covalently linked to a lipophilic group via its side chain
EFXIXQEWGEHRXXEAXXX

SEQ ID NO: 605 - protein, 20 aa, Artificial Sequence
  compstatin analogue
  MISC_FEATURE (1)..(1): Xaa = a lysine residue covalently linked to a lipophilic group via its side chain
  MISC_FEATURE (6)..(6): Xaa = Homocysteine whose side chain forms a cystathionine bridge
  MISC_FEATURE (16)..(16): Alanine whose side chain forms a cystathionine bridge
XGSAIXIWQDWGEHRATEGE

SEQ ID NO: 606 - protein, 21 aa, Artificial Sequence
  compstatin analogue
  MISC_FEATURE (6)..(6): Xaa = Homocysteine whose side chain forms a cystathionine bridge
  MISC_FEATURE (8)..(8): Xaa = 1-Me-Trp
  MISC_FEATURE (16)..(16): Alanine whose side chain forms a cystathionine bridge
  MISC_FEATURE (17)..(17): Xaa = Sar
  MISC_FEATURE (21)..(21): Xaa = a lysine residue covalently linked to a lipophilic group via its side chain
ASGEYXIXQDWGEHRAXEGEX

SEQ ID NO: 607 - protein, 17 aa, Artificial Sequence
  compstatin analogue
  MISC_FEATURE (3)..(3): Xaa = Homocysteine whose side chain forms a cystathionine bridge
  MISC_FEATURE (5)..(5): Xaa = 1-Me-Trp
  MISC_FEATURE (13)..(13): Alanine whose side chain forms a cystathionine bridge
  MISC_FEATURE (17)..(17): Xaa = a lysine residue covalently linked to a lipophilic group via its side chain
EFXIXQDWGEHRAEGEX

SEQ ID NO: 608 - protein, 20 aa, Artificial Sequence
  compstatin analogue
  MISC_FEATURE (6)..(6): Xaa = Homocysteine whose side chain forms a cystathionine bridge
  MISC_FEATURE (16)..(16): Alanine whose side chain forms a cystathionine bridge
  MISC_FEATURE (20)..(20): Xaa = a lysine residue covalently linked to a lipophilic group via its side chain
EGSAIXIWQDWGEHRATEGX

SEQ ID NO: 609 - protein, 18 aa, Artificial Sequence
  compstatin analogue
  MISC_FEATURE (6)..(6): Xaa = Homocysteine whose side chain forms a cystathionine bridge
  MISC_FEATURE (8)..(8): Xaa = 1-Me-Trp
  MISC_FEATURE (15)..(15): Xaa = a lysine residue covalently linked to a lipophilic group via its side chain
  MISC_FEATURE (16)..(16): Alanine whose side chain forms a cystathionine bridge
  MISC_FEATURE (17)..(17): Xaa = Sar
EGSAYXIXQDWGEHXAXE

SEQ ID NO: 610 - protein, 20 aa, Artificial Sequence
  compstatin analogue
  MISC_FEATURE (6)..(6): Xaa = Homocysteine whose side chain forms a cystathionine bridge
  MISC_FEATURE (8)..(8): Xaa = 1-Me-Trp
  MISC_FEATURE (16)..(16): Alanine whose side chain forms a cystathionine bridge
  MISC_FEATURE (17)..(17): Xaa = Sar
  MISC_FEATURE (20)..(20): Xaa = a lysine residue covalently linked to a lipophilic group via its side chain
EGSAYXIXQDWGEHRAXEGX

SEQ ID NO: 611 - protein, 21 aa, Artificial Sequence
  compstatin analogue
  MISC_FEATURE (6)..(6): Xaa = Homocysteine whose side chain forms a cystathionine bridge
  MISC_FEATURE (8)..(8): Xaa = 1-Me-Trp
  MISC_FEATURE (16)..(16): Alanine whose side chain forms a cystathionine bridge
  MISC_FEATURE (17)..(17): Xaa = Sar
  MISC_FEATURE (21)..(21): Xaa = a lysine residue covalently linked to a lipophilic group via its side chain
EGSAYXIXQDWGEHRAXEGEX

SEQ ID NO: 612 - protein, 21 aa, Artificial Sequence
  compstatin analogue
  MISC_FEATURE (6)..(6): Xaa = Homocysteine whose side chain forms a cystathionine bridge
  MISC_FEATURE (8)..(8): Xaa = 1-Me-Trp
  MISC_FEATURE (16)..(16): Alanine whose side chain forms a cystathionine bridge
  MISC_FEATURE (17)..(17): Xaa = Sar
  MISC_FEATURE (21)..(21): Xaa = a lysine residue covalently linked to a lipophilic group via its side chain
EGSAYXIXQDWGEHRAXEGKX

SEQ ID NO: 613 - protein, 21 aa, Artificial Sequence
  compstatin analogue
  MISC_FEATURE (6)..(6): Xaa = Homocysteine whose side chain forms a cystathionine bridge
  MISC_FEATURE (8)..(8): Xaa = 1-Me-Trp
  MISC_FEATURE (16)..(16): Alanine whose side chain forms a cystathionine bridge
  MISC_FEATURE (17)..(17): Xaa = Sar
  MISC_FEATURE (20)..(20): Xaa = gammaGlu
  MISC_FEATURE (21)..(21): Xaa = a lysine residue covalently linked to a lipophilic group via its side chain
EGSAYXIXQDWGEHRAXEKXX

SEQ ID NO: 614 - protein, 18 aa, Artificial Sequence
  compstatin analogue
  MISC_FEATURE (2)..(2): Xaa = Homocysteine whose side chain forms a cystathionine bridge
  MISC_FEATURE (4)..(4): Xaa = 1-Me-Trp
  MISC_FEATURE (12)..(12): Alanine whose side chain forms a cystathionine bridge
  MISC_FEATURE (18)..(18): Xaa = a lysine residue covalently linked to a lipophilic group via its side chain
FXIXQDWGEHRATGAESX

SEQ ID NO: 615 - protein, 16 aa, Artificial Sequence
  compstatin analogue
  MISC_FEATURE (2)..(2): Xaa = Homocysteine whose side chain forms a cystathionine bridge
  MISC_FEATURE (12)..(12): Alanine whose side chain forms a cystathionine bridge
  MISC_FEATURE (16)..(16): Xaa = a lysine residue covalently linked to a lipophilic group via its side chain
IXIWQDWGEHRATEGX

SEQ ID NO: 616 - protein, 17 aa, Artificial Sequence
  compstatin analogue
  MISC_FEATURE (2)..(2): Xaa = Homocysteine whose side chain forms a cystathionine bridge
  MISC_FEATURE (12)..(12): Alanine whose side chain forms a cystathionine bridge
  MISC_FEATURE (17)..(17): Xaa = a lysine residue covalently linked to a lipophilic group via its side chain
IXIWQDWGEHRATEGEX

SEQ ID NO: 617 - protein, 17 aa, Artificial Sequence
  compstatin analogue
  MISC_FEATURE (4)..(4): Xaa = Homocysteine whose side chain forms a cystathionine bridge
  MISC_FEATURE (6)..(6): Xaa = 1-Me-Trp
  MISC_FEATURE (14)..(14): Alanine whose side chain forms a cystathionine bridge
  MISC_FEATURE (15)..(15): Xaa = Sar
  MISC_FEATURE (17)..(17): Xaa = a lysine residue covalently linked to a lipophilic group via its side chain
SAYXIXQDWGEHRAXEX

SEQ ID NO: 618 - protein, 19 aa, Artificial Sequence
  compstatin analogue
  MISC_FEATURE (4)..(4): Xaa = Homocysteine whose side chain forms a cystathionine bridge
  MISC_FEATURE (6)..(6): Xaa = 1-Me-Trp
  MISC_FEATURE (14)..(14): Alanine whose side chain forms a cystathionine bridge
  MISC_FEATURE (15)..(15): Xaa = Sar
  MISC_FEATURE (19)..(19): Xaa = a lysine residue covalently linked to a lipophilic group via its side chain
SEFXIXQDWGEHRAXEGAX

SEQ ID NO: 619 - protein, 21 aa, Artificial Sequence
  compstatin analogue
  MISC_FEATURE (4)..(4): Xaa = Homocysteine whose side chain forms a cystathionine bridge
  MISC_FEATURE (6)..(6): Xaa = 1-Me-Trp
  MISC_FEATURE (14)..(14): Alanine whose side chain forms a cystathionine bridge
  MISC_FEATURE (15)..(15): Xaa = Sar
  MISC_FEATURE (19)..(20): Xaa = Peg3
  MISC_FEATURE (21)..(21): Xaa = a lysine residue covalently linked to a lipophilic group via its side chain
SEFXIXQDWGEHRAXEGEXXX

SEQ ID NO: 620 - protein, 22 aa, Artificial Sequence
  compstatin analogue
  MISC_FEATURE (4)..(4): Xaa = Homocysteine whose side chain forms a cystathionine bridge
  MISC_FEATURE (6)..(6): Xaa = 1-Me-Trp
  MISC_FEATURE (14)..(14): Alanine whose side chain forms a cystathionine bridge
  MISC_FEATURE (15)..(15): Xaa = Sar
  MISC_FEATURE (22)..(22): Xaa = a lysine residue covalently linked to a lipophilic group via its side chain
SEFXIXQDWGEHRAXEGEGGGX

SEQ ID NO: 621 - protein, 20 aa, Artificial Sequence
  compstatin analogue
  MISC_FEATURE (4)..(4): Xaa = Homocysteine whose side chain forms a cystathionine bridge
  MISC_FEATURE (6)..(6): Xaa = 1-Me-Trp
  MISC_FEATURE (14)..(14): Alanine whose side chain forms a cystathionine bridge
  MISC_FEATURE (15)..(15): Xaa = Sar
  MISC_FEATURE (19)..(19): Xaa = Peg3
  MISC_FEATURE (20)..(20): Xaa = a lysine residue covalently linked to a lipophilic group via its side chain
SEFXIXQDWGEHRAXEGEXX

SEQ ID NO: 622 - protein, 22 aa, Artificial Sequence
  compstatin analogue
  MISC_FEATURE (4)..(4): Xaa = Homocysteine whose side chain forms a cystathionine bridge
  MISC_FEATURE (6)..(6): Xaa = 1-Me-Trp
  MISC_FEATURE (14)..(14): Alanine whose side chain forms a cystathionine bridge
  MISC_FEATURE (15)..(15): Xaa = Sar
  MISC_FEATURE (19)..(19): Xaa = Peg3
  MISC_FEATURE (22)..(22): Xaa = a lysine residue covalently linked to a lipophilic group via its side chain
SEFXIXQDWGEHRAXEGEXESX

SEQ ID NO: 623 - protein, 22 aa, Artificial Sequence
  compstatin analogue
  MISC_FEATURE (4)..(4): Xaa = Homocysteine whose side chain forms a cystathionine bridge
  MISC_FEATURE (6)..(6): Xaa = 1-Me-Trp
  MISC_FEATURE (14)..(14): Alanine whose side chain forms a cystathionine bridge
  MISC_FEATURE (15)..(15): Xaa = Sar
  MISC_FEATURE (22)..(22): Xaa = a lysine residue covalently linked to a lipophilic group via its side chain
SEFXIXQDWGEHRAXEGESESX

SEQ ID NO: 624 - protein, 22 aa, Artificial Sequence
  compstatin anaogue
  MISC_FEATURE (4)..(4): Xaa = Homocysteine whose side chain forms a cystathionine bridge
  MISC_FEATURE (6)..(6): Xaa = 1-Me-Trp
  MISC_FEATURE (14)..(14): Alanine whose side chain forms a cystathionine bridge
  MISC_FEATURE (15)..(15): Xaa = Sar
  MISC_FEATURE (18)..(18): Xaa = gammaGlu
  MISC_FEATURE (22)..(22): Xaa = a lysine residue covalently linked to a lipophilic group via its side chain
SEFXIXQDWGEHRAXEKXGGGX

SEQ ID NO: 625 - protein, 20 aa, Artificial Sequence
  compstatin analogue
  MISC_FEATURE (4)..(4): Xaa = Homocysteine whose side chain forms a cystathionine bridge
  MISC_FEATURE (6)..(6): Xaa = 1-Me-Trp
  MISC_FEATURE (14)..(14): Alanine whose side chain forms a cystathionine bridge
  MISC_FEATURE (19)..(19): Xaa = 8-aminooctanoyl
  MISC_FEATURE (20)..(20): Xaa = a lysine residue covalently linked to a lipophilic group via its side chain
SEFXIXQDWGEHRATEGEXX

SEQ ID NO: 626 - protein, 21 aa, Artificial Sequence
  compstatin analogue
  MISC_FEATURE (4)..(4): Xaa = Homocysteine whose side chain forms a cystathionine bridge
  MISC_FEATURE (6)..(6): Xaa = 1-Me-Trp
  MISC_FEATURE (14)..(14): Alanine whose side chain forms a cystathionine bridge
  MISC_FEATURE (19)..(19): Xaa = 8-aminooctanoyl
  MISC_FEATURE (21)..(21): Xaa = a lysine residue covalently linked to a lipophilic group via its side chain
SEFXIXQDWGEHRATEGEXEX

SEQ ID NO: 627 - protein, 22 aa, Artificial Sequence
  compstatin analogue
  MISC_FEATURE (4)..(4): Xaa = Homocysteine whose side chain forms a cystathionine bridge
  MISC_FEATURE (6)..(6): Xaa = 1-Me-Trp
  MISC_FEATURE (14)..(14): Alanine whose side chain forms a cystathionine bridge
  MISC_FEATURE (22)..(22): Xaa = a lysine residue covalently linked to a lipophilic group via its side chain
SEFXIXQDWGEHRATEGEGGGX

SEQ ID NO: 628 - protein, 22 aa, Artificial Sequence
  compstatin analogue
  MISC_FEATURE (4)..(4): Xaa = Homocysteine whose side chain forms a cystathionine bridge
  MISC_FEATURE (6)..(6): Xaa = 1-Me-Trp
  MISC_FEATURE (14)..(14): Alanine whose side chain forms a cystathionine bridge
  MISC_FEATURE (19)..(19): Xaa = Peg3
  MISC_FEATURE (22)..(22): Xaa = a lysine residue covalently linked to a lipophilic group via its side chain
SEFXIXQDWGEHRATEGEXESX

SEQ ID NO: 629 - protein, 21 aa, Artificial Sequence
  compstatin analogue
  MISC_FEATURE (4)..(4): Xaa = Homocysteine whose side chain forms a cystathionine bridge
  MISC_FEATURE (6)..(6): Xaa =1-Me-Trp
  MISC_FEATURE (14)..(14): Alanine whose side chain forms a cystathionine bridge
  MISC_FEATURE (19)..(20): Xaa = Peg3
  MISC_FEATURE (21)..(21): Xaa = a lysine residue covalently linked to a lipophilic group via its side chain
SEFXIXQDWGEHRATEGEXXX

SEQ ID NO: 630 - protein, 22 aa, Artificial Sequence
  compstatin analogue
  MISC_FEATURE (4)..(4): Xaa = Homocysteine whose side chain forms a cystathionine bridge
  MISC_FEATURE (6)..(6): Xaa = 1-Me-Trp
  MISC_FEATURE (14)..(14): Alanine whose side chain forms a cystathionine bridge
  MISC_FEATURE (18)..(18): Xaa = gammaGlu
  MISC_FEATURE (22)..(22): Xaa = a lysine residue covalently linked to a lipophilic group via its side chain
SEFXIXQDWGEHRATEKXGGGX

SEQ ID NO: 631 - protein, 20 aa, Artificial Sequence
  compstatin analogue
  MISC_FEATURE (4)..(4): Xaa = Homocysteine whose side chain forms a cystathionine bridge
  MISC_FEATURE (6)..(6): Xaa = 1-Me-Trp
  MISC_FEATURE (14)..(14): Alanine whose side chain forms a cystathionine bridge
  MISC_FEATURE (20)..(20): Xaa = a lysine residue covalently linked to a lipophilic group via its side chain
SEFXIXQDWGEHRATGAESX

SEQ ID NO: 632 - protein, 19 aa, Artificial Sequence
  compstatin analogue
  MISC_FEATURE (4)..(4): Xaa = Homocysteine whose side chain forms a cystathionine bridge
  MISC_FEATURE (6)..(6): Xaa = 1-Me-Trp
  MISC_FEATURE (14)..(14): Alanine whose side chain forms a cystathionine bridge
  MISC_FEATURE (15)..(15): Xaa = Sar
  MISC_FEATURE (19)..(19): Xaa = a lysine residue covalently linked to a lipophilic group via its side chain
SEFXIXQEWGEHRAXEGAX

SEQ ID NO: 633 - protein, 21 aa, Artificial Sequence
  compstatin analogue
  MISC_FEATURE (4)..(4): Xaa = Homocysteine whose side chain forms a cystathionine bridge
  MISC_FEATURE (6)..(6): Xaa = 1-Me-Trp
  MISC_FEATURE (14)..(14): Alanine whose side chain forms a cystathionine bridge
  MISC_FEATURE (15)..(15): Xaa = Sar
  MISC_FEATURE (19)..(20): Xaa = Peg3
  MISC_FEATURE (21)..(21): Xaa = a lysine residue covalently linked to a lipophilic group via its side chain
SEFXIXQEWGEHRAXEGEXXX

SEQ ID NO: 634 - protein, 19 aa, Artificial Sequence
  compstatin analogue
  MISC_FEATURE (4)..(4): Xaa = Homocysteine whose side chain forms a cystathionine bridge
  MISC_FEATURE (6)..(6): Xaa = 1-Me-Trp
  MISC_FEATURE (14)..(14): Alanine whose side chain forms a cystathionine bridge
  MISC_FEATURE (15)..(15): Xaa = Sar
  MISC_FEATURE (19)..(19): Xaa = a lysine residue covalently linked to a lipophilic group via its side chain
SEYXIXQDWGEHRAXEGAX

SEQ ID NO: 635 - protein, 21 aa, Artificial Sequence
  compstatin analogue
  MISC_FEATURE (4)..(4): Xaa = Homocysteine whose side chain forms a cystathionine bridge
  MISC_FEATURE (6)..(6): Xaa = 1-Me-Trp
  MISC_FEATURE (14)..(14): Alanine whose side chain forms a cystathionine bridge
  MISC_FEATURE (15)..(15): Xaa = Sar
  MISC_FEATURE (19)..(20): Xaa = Peg3
  MISC_FEATURE (21)..(21): Xaa = a lysine residue covalently linked to a lipophilic group via its side chain
SEYXIXQDWGEHRAXEGEXXX

SEQ ID NO: 636 - protein, 19 aa, Artificial Sequence
  compstatin analogue
  MISC_FEATURE (4)..(4): Xaa = Homocysteine whose side chain forms a cystathionine bridge
  MISC_FEATURE (6)..(6): Xaa = 1-Me-Trp
  MISC_FEATURE (14)..(14): Alanine whose side chain forms a cystathionine bridge
  MISC_FEATURE (15)..(15): Xaa = Sar
  MISC_FEATURE (19)..(19): Xaa = a lysine residue covalently linked to a lipophilic group via its side chain
SEYXIXQDWGEHRAXEGEX

SEQ ID NO: 637 - protein, 20 aa, Artificial Sequence
  compstatin analogue
  MISC_FEATURE (4)..(4): Xaa = Homocysteine whose side chain forms a cystathionine bridge
  MISC_FEATURE (6)..(6): Xaa = 1-Me-Trp
  MISC_FEATURE (10)..(10): Xaa = Sar
  MISC_FEATURE (14)..(14): Alanine whose side chain forms a cystathionine bridge
  MISC_FEATURE (15)..(15): Xaa = Sar
  MISC_FEATURE (18)..(18): Xaa = gammaGlu
  MISC_FEATURE (20)..(20): Xaa = a lysine residue covalently linked to a lipophilic group via its side chain
SEYXIXQEWXEHRAXEKXAX

SEQ ID NO: 638 - protein, 19 aa, Artificial Sequence
  compstatin analogue
  MISC_FEATURE (4)..(4): Xaa = Homocysteine whose side chain forms a cystathionine bridge
  MISC_FEATURE (6)..(6): Xaa = 1-Me-Trp
  MISC_FEATURE (14)..(14): Alanine whose side chain forms a cystathionine bridge
  MISC_FEATURE (15)..(15): Xaa = Sar
  MISC_FEATURE (19)..(19): Xaa = a lysine residue covalently linked to a lipophilic group via its side chain
SEYXIXQEWGEHRAXEGAX

SEQ ID NO: 639 - protein, 21 aa, Artificial Sequence
  compstatin analogue
  MISC_FEATURE (4)..(4): Xaa = Homocysteine whose side chain forms a cystathionine bridge
  MISC_FEATURE (6)..(6): Xaa = 1-Me-Trp
  MISC_FEATURE (14)..(14): Alanine whose side chain forms a cystathionine bridge
  MISC_FEATURE (15)..(15): Xaa = Sar
  MISC_FEATURE (19)..(20): Xaa = Peg3
  MISC_FEATURE (21)..(21): Xaa = a lysine residue covalently linked to a lipophilic group via its side chain
SEYXIXQEWGEHRAXEGEXXX

SEQ ID NO: 640 - protein, 18 aa, Artificial Sequence
  compstatin analogue
  MISC_FEATURE (6)..(6): Xaa = Homocysteine whose side chain forms a cystathionine bridge
  MISC_FEATURE (8)..(8): Xaa = 1-Me-Trp
  MISC_FEATURE (16)..(16): Alanine whose side chain forms a cystathionine bridge
  MISC_FEATURE (17)..(17): Xaa = Sar
EGSEYXIXQDWGEHRAXE

SEQ ID NO: 641 - protein, 20 aa, Artificial Sequence
  compstatin analogue
  MISC_FEATURE (6)..(6): Xaa = Homocysteine whose side chain forms a cystathionine bridge
  MISC_FEATURE (16)..(16): Alanine whose side chain forms a cystathionine bridge
ESSAIXIWQDWGEHRATEGE

SEQ ID NO: 642 - protein, 22 aa, Artificial Sequence
  compstatin analogue
  MISC_FEATURE (4)..(4): Xaa = Homocysteine whose side chain forms a cystathionine bridge
  MISC_FEATURE (6)..(6): Xaa = 1-Me-Trp
  MISC_FEATURE (14)..(14): Alanine whose side chain forms a cystathionine bridge
  MISC_FEATURE (15)..(15): Xaa = Sar
  MISC_FEATURE (19)..(21): Xaa = Peg3
  MISC_FEATURE (22)..(22): Xaa = a lysine residue covalently linked to a lipophilic group via its side chain
SEFXIXQDWGEHRAXEGEXXXX

SEQ ID NO: 643 - protein, 19 aa, Artificial Sequence
  compstatin analogue
  MISC_FEATURE (4)..(4): Xaa = Homocysteine whose side chain forms a cystathionine bridge
  MISC_FEATURE (6)..(6): Xaa = 1-Me-Trp
  MISC_FEATURE (10)..(10): Xaa = Sar
  MISC_FEATURE (14)..(14): Alanine whose side chain forms a cystathionine bridge
  MISC_FEATURE (15)..(15): Xaa = Sar
  MISC_FEATURE (17)..(18): Xaa = Peg3
  MISC_FEATURE (19)..(19): Xaa = a lysine residue covalently linked to a lipophilic group via its side chain
SEFXIXQDWXEHRAXEXXX

SEQ ID NO: 644 - protein, 19 aa, Artificial Sequence
  compstatin analogue
  MISC_FEATURE (3)..(3): Xaa = Homocysteine whose side chain forms a cystathionine bridge
  MISC_FEATURE (5)..(5): Xaa = 1-Me-Trp
  MISC_FEATURE (13)..(13): Alanine whose side chain forms a cystathionine bridge
  MISC_FEATURE (14)..(14): Xaa = Sar
  MISC_FEATURE (17)..(18): Xaa = Peg3
  MISC_FEATURE (19)..(19): Xaa = a lysine residue covalently linked to a lipophilic group via its side chain
EFXIXQDWGEHRAXEAXXX

SEQ ID NO: 645 - protein, 21 aa, Artificial Sequence
  compstatin analogue
  MISC_FEATURE (4)..(4): Xaa = Homocysteine whose side chain forms a cystathionine bridge
  MISC_FEATURE (6)..(6): Xaa = 1-Me-Trp
  MISC_FEATURE (10)..(10): Xaa = Sar
  MISC_FEATURE (14)..(14): Alanine whose side chain forms a cystathionine bridge
  MISC_FEATURE (15)..(15): Xaa = Sar
  MISC_FEATURE (19)..(20): Xaa = Peg3
  MISC_FEATURE (21)..(21): Xaa = a lysine residue covalently linked to a lipophilic group via its side chain
GEFXIXQDWXEHRAXEAEXXX

SEQ ID NO: 646 - protein, 22 aa, Artificial Sequence
  compstatin analogue
  MISC_FEATURE (4)..(4): Xaa = Homocysteine whose side chain forms a cystathionine bridge
  MISC_FEATURE (6)..(6): Xaa = 1-Me-Trp
  MISC_FEATURE (10)..(10): Xaa = Sar
  MISC_FEATURE (14)..(14): Alanine whose side chain forms a cystathionine bridge
  MISC_FEATURE (15)..(15): Xaa = Sar
  MISC_FEATURE (19)..(19): Xaa = Peg3
  MISC_FEATURE (22)..(22): Xaa = a lysine residue covalently linked to a lipophilic group via its side chain
SEFXIXQDWXEHRXXEGEXESX

SEQ ID NO: 647 - protein, 22 aa, Artificial Sequence
  compstatin analogue
  MISC_FEATURE (4)..(4): Xaa = Homocysteine whose side chain forms a cystathionine bridge
  MISC_FEATURE (6)..(6): Xaa = 1-Me-Trp
  MISC_FEATURE (14)..(14): Alanine whose side chain forms a cystathionine bridge
  MISC_FEATURE (15)..(15): Xaa = Sar
  MISC_FEATURE (19)..(19): Xaa = Peg3
  MISC_FEATURE (22)..(22): Xaa = a lysine residue covalently linked to a lipophilic group via its side chain
GEFXIXQEWGEHRAXEGEXESX

SEQ ID NO: 648 - protein, 19 aa, Artificial Sequence
  compstatin analogue
  MISC_FEATURE (3)..(3): Xaa = Homocysteine whose side chain forms a cystathionine bridge
  MISC_FEATURE (5)..(5): Xaa = 1-Me-Trp
  MISC_FEATURE (13)..(13): Alanine whose side chain forms a cystathionine bridge
  MISC_FEATURE (14)..(14): Xaa = Sar
  MISC_FEATURE (17)..(18): Xaa = Peg3
  MISC_FEATURE (19)..(19): Xaa = a lysine residue covalently linked to a lipophilic group via its side chain
EFXIXQEWGEHRAXEAXXX

SEQ ID NO: 649 - protein, 20 aa, Artificial Sequence
  compstatin analogue
  MISC_FEATURE (1)..(1): Xaa = a lysine residue covalently linked to a lipophilic group via its side chain
  MISC_FEATURE (6)..(6): Alanine whose side chain forms a cystathionine bridge
  MISC_FEATURE (16)..(16): Xaa = Homocysteine whose side chain forms a cystathionine bridge
XGSAIAIWQDWGEHRXTEGE

SEQ ID NO: 650 - protein, 21 aa, Artificial Sequence
  compstatin analogue
  MISC_FEATURE (6)..(6): Alanine whose side chain forms a cystathionine bridge
  MISC_FEATURE (8)..(8): Xaa = 1-Me-Trp
  MISC_FEATURE (16)..(16): Xaa = Homocysteine whose side chain forms a cystathionine bridge
  MISC_FEATURE (17)..(17): Xaa = Sar
  MISC_FEATURE (21)..(21): Xaa = a lysine residue covalently linked to a lipophilic group via its side chain
ASGEYAIXQDWGEHRXXEGEX

SEQ ID NO: 651 - protein, 17 aa, Artificial Sequence
  compstatin analogue
  MISC_FEATURE (3)..(3): Alanine whose side chain forms a cystathionine bridge
  MISC_FEATURE (5)..(5): Xaa = 1-Me-Trp
  MISC_FEATURE (13)..(13): Xaa = Homocysteine whose side chain forms a cystathionine bridge
  MISC_FEATURE (17)..(17): Xaa = a lysine residue covalently linked to a lipophilic group via its side chain
EFAIXQDWGEHRXEGEX

SEQ ID NO: 652 - protein, 20 aa, Artificial Sequence
  compstatin analogue
  MISC_FEATURE (6)..(6): Alanine whose side chain forms a cystathionine bridge
  MISC_FEATURE (16)..(16): Xaa = Homocysteine whose side chain forms a cystathionine bridge
  MISC_FEATURE (20)..(20): Xaa = a lysine residue covalently linked to a lipophilic group via its side chain
EGSAIAIWQDWGEHRXTEGX

SEQ ID NO: 653 - protein, 18 aa, Artificial Sequence
  compstatin analogue
  MISC_FEATURE (6)..(6): Alanine whose side chain forms a cystathionine bridge
  MISC_FEATURE (8)..(8): Xaa = 1-Me-Trp
  MISC_FEATURE (15)..(15): Xaa = a lysine residue covalently linked to a lipophilic group via its side chain
  MISC_FEATURE (16)..(16): Xaa = Homocysteine whose side chain forms a cystathionine bridge
  MISC_FEATURE (17)..(17): Xaa = Sar
EGSAYAIXQDWGEHXXXE

SEQ ID NO: 654 - protein, 20 aa, Artificial Sequence
  compstatin analogue
  MISC_FEATURE (6)..(6): Alanine whose side chain forms a cystathionine bridge
  MISC_FEATURE (8)..(8): Xaa = 1-Me-Trp
  MISC_FEATURE (16)..(16): Xaa = Homocysteine whose side chain forms a cystathionine bridge
  MISC_FEATURE (17)..(17): Xaa = Sar
  MISC_FEATURE (20)..(20): Xaa = a lysine residue covalently linked to a lipophilic group via its side chain
EGSAYAIXQDWGEHRXXEGX

SEQ ID NO: 655 - protein, 21 aa, Artificial Sequence
  compstatin analogue
  MISC_FEATURE (6)..(6): Alanine whose side chain forms a cystathionine bridge
  MISC_FEATURE (8)..(8): Xaa = 1-Me-Trp
  MISC_FEATURE (16)..(16): Xaa = Homocysteine whose side chain forms a cystathionine bridge
  MISC_FEATURE (17)..(17): Xaa = Sar
  MISC_FEATURE (21)..(21): Xaa = a lysine residue covalently linked to a lipophilic group via its side chain
EGSAYAIXQDWGEHRXXEGEX

SEQ ID NO: 656 - protein, 21 aa, Artificial Sequence
  compstatin analogue
  MISC_FEATURE (6)..(6): Alanine whose side chain forms a cystathionine bridge
  MISC_FEATURE (8)..(8): Xaa = 1-Me-Trp
  MISC_FEATURE (16)..(16): Xaa = Homocysteine whose side chain forms a cystathionine bridge
  MISC_FEATURE (17)..(17): Xaa = Sar
  MISC_FEATURE (21)..(21): Xaa = a lysine residue covalently linked to a lipophilic group via its side chain
EGSAYAIXQDWGEHRXXEGKX

SEQ ID NO: 657 - protein, 21 aa, Artificial Sequence
  compstatin analogue
  MISC_FEATURE (6)..(6): Alanine whose side chain forms a cystathionine bridge
  MISC_FEATURE (8)..(8): Xaa = 1-Me-Trp
  MISC_FEATURE (16)..(16): Xaa = Homocysteine whose side chain forms a cystathionine bridge
  MISC_FEATURE (17)..(17): Xaa = Sar
  MISC_FEATURE (20)..(20): Xaa = gammaGlu
  MISC_FEATURE (21)..(21): Xaa = a lysine residue covalently linked to a lipophilic group via its side chain
EGSAYAIXQDWGEHRXXEKXX

SEQ ID NO: 658 - protein, 18 aa, Artificial Sequence
  compstatin analogue
  MISC_FEATURE (2)..(2): Alanine whose side chain forms a cystathionine bridge
  MISC_FEATURE (4)..(4): Xaa = 1-Me-Trp
  MISC_FEATURE (12)..(12): Xaa = Homocysteine whose side chain forms a cystathionine bridge
  MISC_FEATURE (18)..(18): Xaa = a lysine residue covalently linked to a lipophilic group via its side chain
FAIXQDWGEHRXTGAESX

SEQ ID NO: 659 - protein, 16 aa, Artificial Sequence
  compstatin analogue
  MISC_FEATURE (2)..(2): Alanine whose side chain forms a cystathionine bridge
  MISC_FEATURE (12)..(12): Xaa = Homocysteine whose side chain forms a cystathionine bridge
  MISC_FEATURE (16)..(16): Xaa = a lysine residue covalently linked to a lipophilic group via its side chain
IAIWQDWGEHRXTEGX

SEQ ID NO: 660 - protein, 17 aa, Artificial Sequence
  compstatin analogue
  MISC_FEATURE (2)..(2): Alanine whose side chain forms a cystathionine bridge
  MISC_FEATURE (12)..(12): Xaa = Homocysteine whose side chain forms a cystathionine bridge
  MISC_FEATURE (17)..(17): Xaa = a lysine residue covalently linked to a lipophilic group via its side chain
IAIWQDWGEHRXTEGEX

SEQ ID NO: 661 - protein, 17 aa, Artificial Sequence
  compstatin analogue
  MISC_FEATURE (4)..(4): Alanine whose side chain forms a cystathionine bridge
  MISC_FEATURE (6)..(6): Xaa = 1-Me-Trp
  MISC_FEATURE (14)..(14): Xaa = Homocysteine whose side chain forms a cystathionine bridge
  MISC_FEATURE (15)..(15): Xaa = Sar
  MISC_FEATURE (17)..(17): Xaa = a lysine residue covalently linked to a lipophilic group via its side chain
SAYAIXQDWGEHRXXEX

SEQ ID NO: 662 - protein, 19 aa, Artificial Sequence
  compstatin analogue
  MISC_FEATURE (4)..(4): Alanine whose side chain forms a cystathionine bridge
  MISC_FEATURE (6)..(6): Xaa = 1-Me-Trp
  MISC_FEATURE (14)..(14): Xaa = Homocysteine whose side chain forms a cystathionine bridge
  MISC_FEATURE (15)..(15): Xaa = Sar
  MISC_FEATURE (19)..(19): Xaa = a lysine residue covalently linked to a lipophilic group via its side chain
SEFAIXQDWGEHRXXEGAX

SEQ ID NO: 663 - protein, 21 aa, Artificial Sequence
  compstatin analogue
  MISC_FEATURE (4)..(4): Alanine whose side chain forms a cystathionine bridge
  MISC_FEATURE (6)..(6): Xaa = 1-Me-Trp
  MISC_FEATURE (14)..(14): Xaa = Homocysteine whose side chain forms a cystathionine bridge
  MISC_FEATURE (15)..(15): Xaa = Sar
  MISC_FEATURE (19)..(20): Xaa = Peg3
  MISC_FEATURE (21)..(21): Xaa = a lysine residue covalently linked to a lipophilic group via its side chain
SEFAIXQDWGEHRXXEGEXXX

SEQ ID NO: 664 - protein, 22 aa, Artificial Sequence
  compstatin analogue
  MISC_FEATURE (4)..(4): Alanine whose side chain forms a cystathionine bridge
  MISC_FEATURE (6)..(6): Xaa = 1-Me-Trp
  MISC_FEATURE (14)..(14): Xaa = Homocysteine whose side chain forms a cystathionine bridge
  MISC_FEATURE (15)..(15): Xaa = Sar
  MISC_FEATURE (22)..(22): Xaa = a lysine residue covalently linked to a lipophilic group via its side chain
SEFAIXQDWGEHRXXEGEGGGX

SEQ ID NO: 665 - protein, 20 aa, Artificial Sequence
  compstatin analogue
  MISC_FEATURE (4)..(4): Alanine whose side chain forms a cystathionine bridge
  MISC_FEATURE (6)..(6): Xaa = 1-Me-Trp
  MISC_FEATURE (14)..(14): Xaa = Homocysteine whose side chain forms a cystathionine bridge
  MISC_FEATURE (15)..(15): Xaa = Sar
  MISC_FEATURE (19)..(19): Xaa = Peg3
  MISC_FEATURE (20)..(20): Xaa = a lysine residue covalently linked to a lipophilic group via its side chain
SEFAIXQDWGEHRXXEGEXX

SEQ ID NO: 666 - protein, 22 aa, Artificial Sequence
  compstatin analogue
  MISC_FEATURE (4)..(4): Alanine whose side chain forms a cystathionine bridge
  MISC_FEATURE (6)..(6): Xaa = 1-Me-Trp
  MISC_FEATURE (14)..(14): Xaa = Homocysteine whose side chain forms a cystathionine bridge
  MISC_FEATURE (15)..(15): Xaa = Sar
  MISC_FEATURE (19)..(19): Xaa = Peg3
  MISC_FEATURE (22)..(22): Xaa = a lysine residue covalently linked to a lipophilic group via its side chain
SEFAIXQDWGEHRXXEGEXESX

SEQ ID NO: 667 - protein, 22 aa, Artificial Sequence
  compstatin analogue
  MISC_FEATURE (4)..(4): Alanine whose side chain forms a cystathionine bridge
  MISC_FEATURE (6)..(6): Xaa = 1-Me-Trp
  MISC_FEATURE (14)..(14): Xaa = Homocysteine whose side chain forms a cystathionine bridge
  MISC_FEATURE (15)..(15): Xaa = Sar
  MISC_FEATURE (22)..(22): Xaa = a lysine residue covalently linked to a lipophilic group via its side chain
SEFAIXQDWGEHRXXEGESESX

SEQ ID NO: 668 - protein, 22 aa, Artificial Sequence
  compstatin anaogue
  MISC_FEATURE (4)..(4): Alanine whose side chain forms a cystathionine bridge
  MISC_FEATURE (6)..(6): Xaa = 1-Me-Trp
  MISC_FEATURE (14)..(14): Xaa = Homocysteine whose side chain forms a cystathionine bridge
  MISC_FEATURE (15)..(15): Xaa = Sar
  MISC_FEATURE (18)..(18): Xaa = gammaGlu
  MISC_FEATURE (22)..(22): Xaa = a lysine residue covalently linked to a lipophilic group via its side chain
SEFAIXQDWGEHRXXEKXGGGX

SEQ ID NO: 669 - protein, 20 aa, Artificial Sequence
  compstatin analogue
  MISC_FEATURE (4)..(4): Alanine whose side chain forms a cystathionine bridge
  MISC_FEATURE (6)..(6): Xaa = 1-Me-Trp
  MISC_FEATURE (14)..(14): Xaa = Homocysteine whose side chain forms a cystathionine bridge
  MISC_FEATURE (19)..(19): Xaa = 8-aminooctanoyl
  MISC_FEATURE (20)..(20): Xaa = a lysine residue covalently linked to a lipophilic group via its side chain
SEFAIXQDWGEHRXTEGEXX

SEQ ID NO: 670 - protein, 21 aa, Artificial Sequence
  compstatin analogue
  MISC_FEATURE (4)..(4): Alanine whose side chain forms a cystathionine bridge
  MISC_FEATURE (6)..(6): Xaa = 1-Me-Trp
  MISC_FEATURE (14)..(14): Xaa = Homocysteine whose side chain forms a cystathionine bridge
  MISC_FEATURE (19)..(19): Xaa = 8-aminooctanoyl
  MISC_FEATURE (21)..(21): Xaa = a lysine residue covalently linked to a lipophilic group via its side chain
SEFAIXQDWGEHRXTEGEXEX

SEQ ID NO: 671 - protein, 22 aa, Artificial Sequence
  compstatin analogue
  MISC_FEATURE (4)..(4): Alanine whose side chain forms a cystathionine bridge
  MISC_FEATURE (6)..(6): Xaa = 1-Me-Trp
  MISC_FEATURE (14)..(14): Xaa = Homocysteine whose side chain forms a cystathionine bridge
  MISC_FEATURE (22)..(22): Xaa = a lysine residue covalently linked to a lipophilic group via its side chain
SEFAIXQDWGEHRXTEGEGGGX

SEQ ID NO: 672 - protein, 22 aa, Artificial Sequence
  compstatin analogue
  MISC_FEATURE (4)..(4): Alanine whose side chain forms a cystathionine bridge
  MISC_FEATURE (6)..(6): Xaa = 1-Me-Trp
  MISC_FEATURE (14)..(14): Xaa = Homocysteine whose side chain forms a cystathionine bridge
  MISC_FEATURE (19)..(19): Xaa = Peg3
  MISC_FEATURE (22)..(22): Xaa = a lysine residue covalently linked to a lipophilic group via its side chain
SEFAIXQDWGEHRXTEGEXESX

SEQ ID NO: 673 - protein, 21 aa, Artificial Sequence
  compstatin analogue
  MISC_FEATURE (4)..(4): Alanine whose side chain forms a cystathionine bridge
  MISC_FEATURE (6)..(6): Xaa =1-Me-Trp
  MISC_FEATURE (14)..(14): Xaa = Homocysteine whose side chain forms a cystathionine bridge
  MISC_FEATURE (19)..(20): Xaa = Peg3
  MISC_FEATURE (21)..(21): Xaa = a lysine residue covalently linked to a lipophilic group via its side chain
SEFAIXQDWGEHRXTEGEXXX

SEQ ID NO: 674 - protein, 22 aa, Artificial Sequence
  compstatin analogue
  MISC_FEATURE (4)..(4): Alanine whose side chain forms a cystathionine bridge
  MISC_FEATURE (6)..(6): Xaa = 1-Me-Trp
  MISC_FEATURE (14)..(14): Xaa = Homocysteine whose side chain forms a cystathionine bridge
  MISC_FEATURE (18)..(18): Xaa = gammaGlu
  MISC_FEATURE (22)..(22): Xaa = a lysine residue covalently linked to a lipophilic group via its side chain
SEFAIXQDWGEHRXTEKXGGGX

SEQ ID NO: 675 - protein, 20 aa, Artificial Sequence
  compstatin analogue
  MISC_FEATURE (4)..(4): Alanine whose side chain forms a cystathionine bridge
  MISC_FEATURE (6)..(6): Xaa = 1-Me-Trp
  MISC_FEATURE (14)..(14): Xaa = Homocysteine whose side chain forms a cystathionine bridge
  MISC_FEATURE (20)..(20): Xaa = a lysine residue covalently linked to a lipophilic group via its side chain
SEFAIXQDWGEHRXTGAESX

SEQ ID NO: 676 - protein, 19 aa, Artificial Sequence
  compstatin analogue
  MISC_FEATURE (4)..(4): Alanine whose side chain forms a cystathionine bridge
  MISC_FEATURE (6)..(6): Xaa = 1-Me-Trp
  MISC_FEATURE (14)..(14): Xaa = Homocysteine whose side chain forms a cystathionine bridge
  MISC_FEATURE (15)..(15): Xaa = Sar
  MISC_FEATURE (19)..(19): Xaa = a lysine residue covalently linked to a lipophilic group via its side chain
SEFAIXQEWGEHRXXEGAX

SEQ ID NO: 677 - protein, 21 aa, Artificial Sequence
  compstatin analogue
  MISC_FEATURE (4)..(4): Alanine whose side chain forms a cystathionine bridge
  MISC_FEATURE (6)..(6): Xaa = 1-Me-Trp
  MISC_FEATURE (14)..(14): Xaa = Homocysteine whose side chain forms a cystathionine bridge
  MISC_FEATURE (15)..(15): Xaa = Sar
  MISC_FEATURE (19)..(20): Xaa = Peg3
  MISC_FEATURE (21)..(21): Xaa = a lysine residue covalently linked to a lipophilic group via its side chain
SEFAIXQEWGEHRXXEGEXXX

SEQ ID NO: 678 - protein, 19 aa, Artificial Sequence
  compstatin analogue
  MISC_FEATURE (4)..(4): Alanine whose side chain forms a cystathionine bridge
  MISC_FEATURE (6)..(6): Xaa = 1-Me-Trp
  MISC_FEATURE (14)..(14): Xaa = Homocysteine whose side chain forms a cystathionine bridge
  MISC_FEATURE (15)..(15): Xaa = Sar
  MISC_FEATURE (19)..(19): Xaa = a lysine residue covalently linked to a lipophilic group via its side chain
SEYAIXQDWGEHRXXEGAX

SEQ ID NO: 679 - protein, 21 aa, Artificial Sequence
  compstatin analogue
  MISC_FEATURE (4)..(4): Alanine whose side chain forms a cystathionine bridge
  MISC_FEATURE (6)..(6): Xaa = 1-Me-Trp
  MISC_FEATURE (14)..(14): Xaa = Homocysteine whose side chain forms a cystathionine bridge
  MISC_FEATURE (15)..(15): Xaa = Sar
  MISC_FEATURE (19)..(20): Xaa = Peg3
  MISC_FEATURE (21)..(21): Xaa = a lysine residue covalently linked to a lipophilic group via its side chain
SEYAIXQDWGEHRXXEGEXXX

SEQ ID NO: 680 - protein, 19 aa, Artificial Sequence
  compstatin analogue
  MISC_FEATURE (4)..(4): Alanine whose side chain forms a cystathionine bridge
  MISC_FEATURE (6)..(6): Xaa = 1-Me-Trp
  MISC_FEATURE (14)..(14): Xaa = Homocysteine whose side chain forms a cystathionine bridge
  MISC_FEATURE (15)..(15): Xaa = Sar
  MISC_FEATURE (19)..(19): Xaa = a lysine residue covalently linked to a lipophilic group via its side chain
SEYAIXQDWGEHRXXEGEX

SEQ ID NO: 681 - protein, 20 aa, Artificial Sequence
  compstatin analogue
  MISC_FEATURE (4)..(4): Alanine whose side chain forms a cystathionine bridge
  MISC_FEATURE (6)..(6): Xaa = 1-Me-Trp
  MISC_FEATURE (10)..(10): Xaa = Sar
  MISC_FEATURE (14)..(14): Xaa = Homocysteine whose side chain forms a cystathionine bridge
  MISC_FEATURE (15)..(15): Xaa = Sar
  MISC_FEATURE (18)..(18): Xaa = gammaGlu
  MISC_FEATURE (20)..(20): Xaa = a lysine residue covalently linked to a lipophilic group via its side chain
SEYAIXQEWXEHRXXEKXAX

SEQ ID NO: 682 - protein, 19 aa, Artificial Sequence
  compstatin analogue
  MISC_FEATURE (4)..(4): Alanine whose side chain forms a cystathionine bridge
  MISC_FEATURE (6)..(6): Xaa = 1-Me-Trp
  MISC_FEATURE (14)..(14): Xaa = Homocysteine whose side chain forms a cystathionine bridge
  MISC_FEATURE (15)..(15): Xaa = Sar
  MISC_FEATURE (19)..(19): Xaa = a lysine residue covalently linked to a lipophilic group via its side chain
SEYAIXQEWGEHRXXEGAX

SEQ ID NO: 683 - protein, 21 aa, Artificial Sequence
  compstatin analogue
  MISC_FEATURE (4)..(4): Alanine whose side chain forms a cystathionine bridge
  MISC_FEATURE (6)..(6): Xaa = 1-Me-Trp
  MISC_FEATURE (14)..(14): Xaa = Homocysteine whose side chain forms a cystathionine bridge
  MISC_FEATURE (15)..(15): Xaa = Sar
  MISC_FEATURE (19)..(20): Xaa = Peg3
  MISC_FEATURE (21)..(21): Xaa = a lysine residue covalently linked to a lipophilic group via its side chain
SEYAIXQEWGEHRXXEGEXXX

SEQ ID NO: 684 - protein, 18 aa, Artificial Sequence
  compstatin analogue
  MISC_FEATURE (6)..(6): Alanine whose side chain forms a cystathionine bridge
  MISC_FEATURE (8)..(8): Xaa = 1-Me-Trp
  MISC_FEATURE (16)..(16): Xaa = Homocysteine whose side chain forms a cystathionine bridge
  MISC_FEATURE (17)..(17): Xaa = Sar
EGSEYAIXQDWGEHRXXE

SEQ ID NO: 685 - protein, 20 aa, Artificial Sequence
  compstatin analogue
  MISC_FEATURE (6)..(6): Alanine whose side chain forms a cystathionine bridge
  MISC_FEATURE (16)..(16): Xaa = Homocysteine whose side chain forms a cystathionine bridge
ESSAIAIWQDWGEHRXTEGE

SEQ ID NO: 686 - protein, 22 aa, Artificial Sequence
  compstatin analogue
  MISC_FEATURE (4)..(4): Alanine whose side chain forms a cystathionine bridge
  MISC_FEATURE (6)..(6): Xaa = 1-Me-Trp
  MISC_FEATURE (14)..(14): Xaa = Homocysteine whose side chain forms a cystathionine bridge
  MISC_FEATURE (15)..(15): Xaa = Sar
  MISC_FEATURE (19)..(21): Xaa = Peg3
  MISC_FEATURE (22)..(22): Xaa = a lysine residue covalently linked to a lipophilic group via its side chain
SEFAIXQDWGEHRXXEGEXXXX

SEQ ID NO: 687 - protein, 19 aa, Artificial Sequence
  compstatin analogue
  MISC_FEATURE (4)..(4): Alanine whose side chain forms a cystathionine bridge
  MISC_FEATURE (6)..(6): Xaa = 1-Me-Trp
  MISC_FEATURE (10)..(10): Xaa = Sar
  MISC_FEATURE (14)..(14): Xaa = Homocysteine whose side chain forms a cystathionine bridge
  MISC_FEATURE (15)..(15): Xaa = Sar
  MISC_FEATURE (17)..(18): Xaa = Peg3
  MISC_FEATURE (19)..(19): Xaa = a lysine residue covalently linked to a lipophilic group via its side chain
SEFAIXQDWXEHRXXEXXX

SEQ ID NO: 688 - protein, 19 aa, Artificial Sequence
  compstatin analogue
  MISC_FEATURE (3)..(3): Alanine whose side chain forms a cystathionine bridge
  MISC_FEATURE (5)..(5): Xaa = 1-Me-Trp
  MISC_FEATURE (13)..(13): Xaa = Homocysteine whose side chain forms a cystathionine bridge
  MISC_FEATURE (14)..(14): Xaa = Sar
  MISC_FEATURE (17)..(18): Xaa = Peg3
  MISC_FEATURE (19)..(19): Xaa = a lysine residue covalently linked to a lipophilic group via its side chain
EFAIXQDWGEHRXXEAXXX

SEQ ID NO: 689 - protein, 21 aa, Artificial Sequence
  compstatin analogue
  MISC_FEATURE (4)..(4): Alanine whose side chain forms a cystathionine bridge
  MISC_FEATURE (6)..(6): Xaa = 1-Me-Trp
  MISC_FEATURE (10)..(10): Xaa = Sar
  MISC_FEATURE (14)..(14): Xaa = Homocysteine whose side chain forms a cystathionine bridge
  MISC_FEATURE (15)..(15): Xaa = Sar
  MISC_FEATURE (19)..(20): Xaa = Peg3
  MISC_FEATURE (21)..(21): Xaa = a lysine residue covalently linked to a lipophilic group via its side chain
GEFAIXQDWXEHRXXEAEXXX

SEQ ID NO: 690 - protein, 22 aa, Artificial Sequence
  compstatin analogue
  MISC_FEATURE (4)..(4): Alanine whose side chain forms a cystathionine bridge
  MISC_FEATURE (6)..(6): Xaa = 1-Me-Trp
  MISC_FEATURE (10)..(10): Xaa = Sar
  MISC_FEATURE (14)..(14): Xaa = Homocysteine whose side chain forms a cystathionine bridge
  misc_feature (15)..(15): Xaa = Sar
  misc_feature (19)..(19): Xaa = Peg3
  MISC_FEATURE (22)..(22): Xaa = a lysine residue covalently linked to a lipophilic group via its side chain
SEFAIXQDWXEHRXXEGEXESX

SEQ ID NO: 691 - protein, 22 aa, Artificial Sequence
  compstatin analogue
  MISC_FEATURE (4)..(4): Alanine whose side chain forms a cystathionine bridge
  MISC_FEATURE (6)..(6): Xaa = 1-Me-Trp
  MISC_FEATURE (14)..(14): Xaa = Homocysteine whose side chain forms a cystathionine bridge
  MISC_FEATURE (15)..(15): Xaa = Sar
  MISC_FEATURE (19)..(19): Xaa = Peg3
  MISC_FEATURE (22)..(22): Xaa = a lysine residue covalently linked to a lipophilic group via its side chain
GEFAIXQEWGEHRXXEGEXESX

SEQ ID NO: 692 - protein, 19 aa, Artificial Sequence
  compstatin analogue
  MISC_FEATURE (3)..(3): Alanine whose side chain forms a cystathionine bridge
  MISC_FEATURE (5)..(5): Xaa = 1-Me-Trp
  MISC_FEATURE (13)..(13): Xaa = Homocysteine whose side chain forms a cystathionine bridge
  MISC_FEATURE (14)..(14): Xaa = Sar
  MISC_FEATURE (17)..(18): Xaa = Peg3
  MISC_FEATURE (19)..(19): Xaa = a lysine residue covalently linked to a lipophilic group via its side chain
EFAIXQEWGEHRXXEAXXX

SEQ ID NO: 693 - protein, 20 aa, Artificial Sequence
  compstatin analogue
  MISC_FEATURE (1)..(1): Xaa = a lysine residue covalently linked to a lipophilic group via its side chain
  MISC_FEATURE (6)..(6): Cysteine whose side chain forms a lanthionine bridge
  MISC_FEATURE (16)..(16): Alanine whose side chain forms a lanthionine bridge
XGSAICIWQDWGEHRATEGE

SEQ ID NO: 694 - protein, 21 aa, Artificial Sequence
  compstatin analogue
  MISC_FEATURE (6)..(6): Cysteine whose side chain forms a lanthionine bridge
  MISC_FEATURE (8)..(8): Xaa = 1-Me-Trp
  MISC_FEATURE (16)..(16): Alanine whose side chain forms a lanthionine bridge
  MISC_FEATURE (17)..(17): Xaa = Sar
  MISC_FEATURE (21)..(21): Xaa = a lysine residue covalently linked to a lipophilic group via its side chain
ASGEYCIXQDWGEHRAXEGEX

SEQ ID NO: 695 - protein, 17 aa, Artificial Sequence
  compstatin analogue
  MISC_FEATURE (3)..(3): Cysteine whose side chain forms a lanthionine bridge
  MISC_FEATURE (5)..(5): Xaa = 1-Me-Trp
  MISC_FEATURE (13)..(13): Alanine whose side chain forms a lanthionine bridge
  MISC_FEATURE (17)..(17): Xaa = a lysine residue covalently linked to a lipophilic group via its side chain
EFCIXQDWGEHRAEGEX

SEQ ID NO: 696 - protein, 20 aa, Artificial Sequence
  compstatin analogue
  MISC_FEATURE (6)..(6): Cysteine whose side chain forms a lanthionine bridge
  MISC_FEATURE (16)..(16): Alanine whose side chain forms a lanthionine bridge
  MISC_FEATURE (20)..(20): Xaa = a lysine residue covalently linked to a lipophilic group via its side chain
EGSAICIWQDWGEHRATEGX

SEQ ID NO: 697 - protein, 18 aa, Artificial Sequence
  compstatin analogue
  MISC_FEATURE (6)..(6): Cysteine whose side chain forms a lanthionine bridge
  MISC_FEATURE (8)..(8): Xaa = 1-Me-Trp
  MISC_FEATURE (15)..(15): Xaa = a lysine residue covalently linked to a lipophilic group via its side chain
  MISC_FEATURE (16)..(16): Alanine whose side chain forms a lanthionine bridge
  MISC_FEATURE (17)..(17): Xaa = Sar
EGSAYCIXQDWGEHXAXE

SEQ ID NO: 698 - protein, 20 aa, Artificial Sequence
  compstatin analogue
  MISC_FEATURE (6)..(6): Cysteine whose side chain forms a lanthionine bridge
  MISC_FEATURE (8)..(8): Xaa = 1-Me-Trp
  MISC_FEATURE (16)..(16): Alanine whose side chain forms a lanthionine bridge
  MISC_FEATURE (17)..(17): Xaa = Sar
  MISC_FEATURE (20)..(20): Xaa = a lysine residue covalently linked to a lipophilic group via its side chain
EGSAYCIXQDWGEHRAXEGX

SEQ ID NO: 699 - protein, 21 aa, Artificial Sequence
  compstatin analogue
  MISC_FEATURE (6)..(6): Cysteine whose side chain forms a lanthionine bridge
  MISC_FEATURE (8)..(8): Xaa = 1-Me-Trp
  MISC_FEATURE (16)..(16): Alanine whose side chain forms a lanthionine bridge
  MISC_FEATURE (17)..(17): Xaa = Sar
  MISC_FEATURE (21)..(21): Xaa = a lysine residue covalently linked to a lipophilic group via its side chain
EGSAYCIXQDWGEHRAXEGEX

SEQ ID NO: 700 - protein, 21 aa, Artificial Sequence
  compstatin analogue
  MISC_FEATURE (6)..(6): Cysteine whose side chain forms a lanthionine bridge
  MISC_FEATURE (8)..(8): Xaa = 1-Me-Trp
  MISC_FEATURE (16)..(16): Alanine whose side chain forms a lanthionine bridge
  MISC_FEATURE (17)..(17): Xaa = Sar
  MISC_FEATURE (21)..(21): Xaa = a lysine residue covalently linked to a lipophilic group via its side chain
EGSAYCIXQDWGEHRAXEGKX

SEQ ID NO: 701 - protein, 21 aa, Artificial Sequence
  compstatin analogue
  MISC_FEATURE (6)..(6): Cysteine whose side chain forms a lanthionine bridge
  MISC_FEATURE (8)..(8): Xaa = 1-Me-Trp
  MISC_FEATURE (16)..(16): Alanine whose side chain forms a lanthionine bridge
  MISC_FEATURE (17)..(17): Xaa = Sar
  MISC_FEATURE (20)..(20): Xaa = gammaGlu
  MISC_FEATURE (21)..(21): Xaa = a lysine residue covalently linked to a lipophilic group via its side chain
EGSAYCIXQDWGEHRAXEKXX

SEQ ID NO: 702 - protein, 18 aa, Artificial Sequence
  compstatin analogue
  MISC_FEATURE (2)..(2): Cysteine whose side chain forms a lanthionine bridge
  MISC_FEATURE (4)..(4): Xaa = 1-Me-Trp
  MISC_FEATURE (12)..(12): Alanine whose side chain forms a lanthionine bridge
  MISC_FEATURE (18)..(18): Xaa = a lysine residue covalently linked to a lipophilic group via its side chain
FCIXQDWGEHRATGAESX

SEQ ID NO: 703 - protein, 16 aa, Artificial Sequence
  compstatin analogue
  MISC_FEATURE (2)..(2): Cysteine whose side chain forms a lanthionine bridge
  MISC_FEATURE (12)..(12): Alanine whose side chain forms a lanthionine bridge
  MISC_FEATURE (16)..(16): Xaa = a lysine residue covalently linked to a lipophilic group via its side chain
ICIWQDWGEHRATEGX

SEQ ID NO: 704 - protein, 17 aa, Artificial Sequence
  compstatin analogue
  MISC_FEATURE (2)..(2): Cysteine whose side chain forms a lanthionine bridge
  MISC_FEATURE (12)..(12): Alanine whose side chain forms a lanthionine bridge
  MISC_FEATURE (17)..(17): Xaa = a lysine residue covalently linked to a lipophilic group via its side chain
ICIWQDWGEHRATEGEX

SEQ ID NO: 705 - protein, 17 aa, Artificial Sequence
  compstatin analogue
  MISC_FEATURE (4)..(4): Cysteine whose side chain forms a lanthionine bridge
  MISC_FEATURE (6)..(6): Xaa = 1-Me-Trp
  MISC_FEATURE (14)..(14): Alanine whose side chain forms a lanthionine bridge
  MISC_FEATURE (15)..(15): Xaa = Sar
  MISC_FEATURE (17)..(17): Xaa = a lysine residue covalently linked to a lipophilic group via its side chain
SAYCIXQDWGEHRAXEX

SEQ ID NO: 706 - protein, 19 aa, Artificial Sequence
  compstatin analogue
  MISC_FEATURE (4)..(4): Cysteine whose side chain forms a lanthionine bridge
  MISC_FEATURE (6)..(6): Xaa = 1-Me-Trp
  MISC_FEATURE (14)..(14): Alanine whose side chain forms a lanthionine bridge
  MISC_FEATURE (15)..(15): Xaa = Sar
  MISC_FEATURE (19)..(19): Xaa = a lysine residue covalently linked to a lipophilic group via its side chain
SEFCIXQDWGEHRAXEGAX

SEQ ID NO: 707 - protein, 21 aa, Artificial Sequence
  compstatin analogue
  MISC_FEATURE (4)..(4): Cysteine whose side chain forms a lanthionine bridge
  MISC_FEATURE (6)..(6): Xaa = 1-Me-Trp
  MISC_FEATURE (14)..(14): Alanine whose side chain forms a lanthionine bridge
  MISC_FEATURE (15)..(15): Xaa = Sar
  MISC_FEATURE (19)..(20): Xaa = Peg3
  MISC_FEATURE (21)..(21): Xaa = a lysine residue covalently linked to a lipophilic group via its side chain
SEFCIXQDWGEHRAXEGEXXX

SEQ ID NO: 708 - protein, 22 aa, Artificial Sequence
  compstatin analogue
  MISC_FEATURE (4)..(4): Cysteine whose side chain forms a lanthionine bridge
  MISC_FEATURE (6)..(6): Xaa = 1-Me-Trp
  MISC_FEATURE (14)..(14): Alanine whose side chain forms a lanthionine bridge
  MISC_FEATURE (15)..(15): Xaa = Sar
  MISC_FEATURE (22)..(22): Xaa = a lysine residue covalently linked to a lipophilic group via its side chain
SEFCIXQDWGEHRAXEGEGGGX

SEQ ID NO: 709 - protein, 20 aa, Artificial Sequence
  compstatin analogue
  MISC_FEATURE (4)..(4): Cysteine whose side chain forms a lanthionine bridge
  MISC_FEATURE (6)..(6): Xaa = 1-Me-Trp
  MISC_FEATURE (14)..(14): Alanine whose side chain forms a lanthionine bridge
  MISC_FEATURE (15)..(15): Xaa = Sar
  MISC_FEATURE (19)..(19): Xaa = Peg3
  MISC_FEATURE (20)..(20): Xaa = a lysine residue covalently linked to a lipophilic group via its side chain
SEFCIXQDWGEHRAXEGEXX

SEQ ID NO: 710 - protein, 22 aa, Artificial Sequence
  compstatin analogue
  MISC_FEATURE (4)..(4): Cysteine whose side chain forms a lanthionine bridge
  MISC_FEATURE (6)..(6): Xaa = 1-Me-Trp
  MISC_FEATURE (14)..(14): Alanine whose side chain forms a lanthionine bridge
  MISC_FEATURE (15)..(15): Xaa = Sar
  MISC_FEATURE (19)..(19): Xaa = Peg3
  MISC_FEATURE (22)..(22): Xaa = a lysine residue covalently linked to a lipophilic group via its side chain
SEFCIXQDWGEHRAXEGEXESX

SEQ ID NO: 711 - protein, 22 aa, Artificial Sequence
  compstatin analogue
  MISC_FEATURE (4)..(4): Cysteine whose side chain forms a lanthionine bridge
  MISC_FEATURE (6)..(6): Xaa = 1-Me-Trp
  MISC_FEATURE (14)..(14): Alanine whose side chain forms a lanthionine bridge
  MISC_FEATURE (15)..(15): Xaa = Sar
  MISC_FEATURE (22)..(22): Xaa = a lysine residue covalently linked to a lipophilic group via its side chain
SEFCIXQDWGEHRAXEGESESX

SEQ ID NO: 712 - protein, 22 aa, Artificial Sequence
  compstatin anaogue
  MISC_FEATURE (4)..(4): Cysteine whose side chain forms a lanthionine bridge
  MISC_FEATURE (6)..(6): Xaa = 1-Me-Trp
  MISC_FEATURE (14)..(14): Alanine whose side chain forms a lanthionine bridge
  MISC_FEATURE (15)..(15): Xaa = Sar
  MISC_FEATURE (18)..(18): Xaa = gammaGlu
  MISC_FEATURE (22)..(22): Xaa = a lysine residue covalently linked to a lipophilic group via its side chain
SEFCIXQDWGEHRAXEKXGGGX

SEQ ID NO: 713 - protein, 20 aa, Artificial Sequence
  compstatin analogue
  MISC_FEATURE (4)..(4): Cysteine whose side chain forms a lanthionine bridge
  MISC_FEATURE (6)..(6): Xaa = 1-Me-Trp
  MISC_FEATURE (14)..(14): Alanine whose side chain forms a lanthionine bridge
  MISC_FEATURE (19)..(19): Xaa = 8-aminooctanoyl
  MISC_FEATURE (20)..(20): Xaa = a lysine residue covalently linked to a lipophilic group via its side chain
SEFCIXQDWGEHRATEGEXX

SEQ ID NO: 714 - protein, 21 aa, Artificial Sequence
  compstatin analogue
  MISC_FEATURE (4)..(4): Cysteine whose side chain forms a lanthionine bridge
  MISC_FEATURE (6)..(6): Xaa = 1-Me-Trp
  MISC_FEATURE (14)..(14): Alanine whose side chain forms a lanthionine bridge
  MISC_FEATURE (19)..(19): Xaa = 8-aminooctanoyl
  MISC_FEATURE (21)..(21): Xaa = a lysine residue covalently linked to a lipophilic group via its side chain
SEFCIXQDWGEHRATEGEXEX

SEQ ID NO: 715 - protein, 22 aa, Artificial Sequence
  compstatin analogue
  MISC_FEATURE (4)..(4): Cysteine whose side chain forms a lanthionine bridge
  MISC_FEATURE (6)..(6): Xaa = 1-Me-Trp
  MISC_FEATURE (14)..(14): Alanine whose side chain forms a lanthionine bridge
  MISC_FEATURE (22)..(22): Xaa = a lysine residue covalently linked to a lipophilic group via its side chain
SEFCIXQDWGEHRATEGEGGGX

SEQ ID NO: 716 - protein, 22 aa, Artificial Sequence
  compstatin analogue
  MISC_FEATURE (4)..(4): Cysteine whose side chain forms a lanthionine bridge
  MISC_FEATURE (6)..(6): Xaa = 1-Me-Trp
  MISC_FEATURE (14)..(14): Alanine whose side chain forms a lanthionine bridge
  MISC_FEATURE (19)..(19): Xaa = Peg3
  MISC_FEATURE (22)..(22): Xaa = a lysine residue covalently linked to a lipophilic group via its side chain
SEFCIXQDWGEHRATEGEXESX

SEQ ID NO: 717 - protein, 21 aa, Artificial Sequence
  compstatin analogue
  MISC_FEATURE (4)..(4): Cysteine whose side chain forms a lanthionine bridge
  MISC_FEATURE (6)..(6): Xaa =1-Me-Trp
  MISC_FEATURE (14)..(14): Alanine whose side chain forms a lanthionine bridge
  MISC_FEATURE (19)..(20): Xaa = Peg3
  MISC_FEATURE (21)..(21): Xaa = a lysine residue covalently linked to a lipophilic group via its side chain
SEFCIXQDWGEHRATEGEXXX

SEQ ID NO: 718 - protein, 22 aa, Artificial Sequence
  compstatin analogue
  MISC_FEATURE (4)..(4): Cysteine whose side chain forms a lanthionine bridge
  MISC_FEATURE (6)..(6): Xaa = 1-Me-Trp
  MISC_FEATURE (14)..(14): Alanine whose side chain forms a lanthionine bridge
  MISC_FEATURE (18)..(18): Xaa = gammaGlu
  MISC_FEATURE (22)..(22): Xaa = a lysine residue covalently linked to a lipophilic group via its side chain
SEFCIXQDWGEHRATEKXGGGX

SEQ ID NO: 719 - protein, 20 aa, Artificial Sequence
  compstatin analogue
  MISC_FEATURE (4)..(4): Cysteine whose side chain forms a lanthionine bridge
  MISC_FEATURE (6)..(6): Xaa = 1-Me-Trp
  MISC_FEATURE (14)..(14): Alanine whose side chain forms a lanthionine bridge
  MISC_FEATURE (20)..(20): Xaa = a lysine residue covalently linked to a lipophilic group via its side chain
SEFCIXQDWGEHRATGAESX

SEQ ID NO: 720 - protein, 19 aa, Artificial Sequence
  compstatin analogue
  MISC_FEATURE (4)..(4): Cysteine whose side chain forms a lanthionine bridge
  MISC_FEATURE (6)..(6): Xaa = 1-Me-Trp
  MISC_FEATURE (14)..(14): Alanine whose side chain forms a lanthionine bridge
  MISC_FEATURE (15)..(15): Xaa = Sar
  MISC_FEATURE (19)..(19): Xaa = a lysine residue covalently linked to a lipophilic group via its side chain
SEFCIXQEWGEHRAXEGAX

SEQ ID NO: 721 - protein, 21 aa, Artificial Sequence
  compstatin analogue
  MISC_FEATURE (4)..(4): Cysteine whose side chain forms a lanthionine bridge
  MISC_FEATURE (6)..(6): Xaa = 1-Me-Trp
  MISC_FEATURE (14)..(14): Alanine whose side chain forms a lanthionine bridge
  MISC_FEATURE (15)..(15): Xaa = Sar
  MISC_FEATURE (19)..(20): Xaa = Peg3
  MISC_FEATURE (21)..(21): Xaa = a lysine residue covalently linked to a lipophilic group via its side chain
SEFCIXQEWGEHRAXEGEXXX

SEQ ID NO: 722 - protein, 19 aa, Artificial Sequence
  compstatin analogue
  MISC_FEATURE (4)..(4): Cysteine whose side chain forms a lanthionine bridge
  MISC_FEATURE (6)..(6): Xaa = 1-Me-Trp
  MISC_FEATURE (14)..(14): Alanine whose side chain forms a lanthionine bridge
  MISC_FEATURE (15)..(15): Xaa = Sar
  MISC_FEATURE (19)..(19): Xaa = a lysine residue covalently linked to a lipophilic group via its side chain
SEYCIXQDWGEHRAXEGAX

SEQ ID NO: 723 - protein, 21 aa, Artificial Sequence
  compstatin analogue
  MISC_FEATURE (4)..(4): Cysteine whose side chain forms a lanthionine bridge
  MISC_FEATURE (6)..(6): Xaa = 1-Me-Trp
  MISC_FEATURE (14)..(14): Alanine whose side chain forms a lanthionine bridge
  MISC_FEATURE (15)..(15): Xaa = Sar
  MISC_FEATURE (19)..(20): Xaa = Peg3
  MISC_FEATURE (21)..(21): Xaa = a lysine residue covalently linked to a lipophilic group via its side chain
SEYCIXQDWGEHRAXEGEXXX

SEQ ID NO: 724 - protein, 19 aa, Artificial Sequence
  compstatin analogue
  MISC_FEATURE (4)..(4): Cysteine whose side chain forms a lanthionine bridge
  MISC_FEATURE (6)..(6): Xaa = 1-Me-Trp
  MISC_FEATURE (14)..(14): Alanine whose side chain forms a lanthionine bridge
  MISC_FEATURE (15)..(15): Xaa = Sar
  MISC_FEATURE (19)..(19): Xaa = a lysine residue covalently linked to a lipophilic group via its side chain
SEYCIXQDWGEHRAXEGEX

SEQ ID NO: 725 - protein, 20 aa, Artificial Sequence
  compstatin analogue
  MISC_FEATURE (4)..(4): Cysteine whose side chain forms a lanthionine bridge
  MISC_FEATURE (6)..(6): Xaa = 1-Me-Trp
  MISC_FEATURE (10)..(10): Xaa = Sar
  MISC_FEATURE (14)..(14): Alanine whose side chain forms a lanthionine bridge
  MISC_FEATURE (15)..(15): Xaa = Sar
  MISC_FEATURE (18)..(18): Xaa = gammaGlu
  MISC_FEATURE (20)..(20): Xaa = a lysine residue covalently linked to a lipophilic group via its side chain
SEYCIXQEWXEHRAXEKXAX

SEQ ID NO: 726 - protein, 19 aa, Artificial Sequence
  compstatin analogue
  MISC_FEATURE (4)..(4): Cysteine whose side chain forms a lanthionine bridge
  MISC_FEATURE (6)..(6): Xaa = 1-Me-Trp
  MISC_FEATURE (14)..(14): Alanine whose side chain forms a lanthionine bridge
  MISC_FEATURE (15)..(15): Xaa = Sar
  MISC_FEATURE (19)..(19): Xaa = a lysine residue covalently linked to a lipophilic group via its side chain
SEYCIXQEWGEHRAXEGAX

SEQ ID NO: 727 - protein, 21 aa, Artificial Sequence
  compstatin analogue
  MISC_FEATURE (4)..(4): Cysteine whose side chain forms a lanthionine bridge
  MISC_FEATURE (6)..(6): Xaa = 1-Me-Trp
  MISC_FEATURE (14)..(14): Alanine whose side chain forms a lanthionine bridge
  MISC_FEATURE (15)..(15): Xaa = Sar
  MISC_FEATURE (19)..(20): Xaa = Peg3
  MISC_FEATURE (21)..(21): Xaa = a lysine residue covalently linked to a lipophilic group via its side chain
SEYCIXQEWGEHRAXEGEXXX

SEQ ID NO: 728 - protein, 18 aa, Artificial Sequence
  compstatin analogue
  MISC_FEATURE (6)..(6): Cysteine whose side chain forms a lanthionine bridge
  MISC_FEATURE (8)..(8): Xaa = 1-Me-Trp
  MISC_FEATURE (16)..(16): Alanine whose side chain forms a lanthionine bridge
  MISC_FEATURE (17)..(17): Xaa = Sar
EGSEYCIXQDWGEHRAXE

SEQ ID NO: 729 - protein, 20 aa, Artificial Sequence
  compstatin analogue
  MISC_FEATURE (6)..(6): Cysteine whose side chain forms a lanthionine bridge
  MISC_FEATURE (16)..(16): Alanine whose side chain forms a lanthionine bridge
ESSAICIWQDWGEHRATEGE

SEQ ID NO: 730 - protein, 22 aa, Artificial Sequence
  compstatin analogue
  MISC_FEATURE (4)..(4): Cysteine whose side chain forms a lanthionine bridge
  MISC_FEATURE (6)..(6): Xaa = 1-Me-Trp
  MISC_FEATURE (14)..(14): Alanine whose side chain forms a lanthionine bridge
  MISC_FEATURE (15)..(15): Xaa = Sar
  MISC_FEATURE (19)..(21): Xaa = Peg3
  MISC_FEATURE (22)..(22): Xaa = a lysine residue covalently linked to a lipophilic group via its side chain
SEFCIXQDWGEHRAXEGEXXXX

SEQ ID NO: 731 - protein, 19 aa, Artificial Sequence
  compstatin analogue
  MISC_FEATURE (4)..(4): Cysteine whose side chain forms a lanthionine bridge
  MISC_FEATURE (6)..(6): Xaa = 1-Me-Trp
  MISC_FEATURE (10)..(10): Xaa = Sar
  MISC_FEATURE (14)..(14): Alanine whose side chain forms a lanthionine bridge
  MISC_FEATURE (15)..(15): Xaa = Sar
  MISC_FEATURE (17)..(18): Xaa = Peg3
  MISC_FEATURE (19)..(19): Xaa = a lysine residue covalently linked to a lipophilic group via its side chain
SEFCIXQDWXEHRAXEXXX

SEQ ID NO: 732 - protein, 19 aa, Artificial Sequence
  compstatin analogue
  MISC_FEATURE (3)..(3): Cysteine whose side chain forms a lanthionine bridge
  MISC_FEATURE (5)..(5): Xaa = 1-Me-Trp
  MISC_FEATURE (13)..(13): Alanine whose side chain forms a lanthionine bridge
  MISC_FEATURE (14)..(14): Xaa = Sar
  MISC_FEATURE (17)..(18): Xaa = Peg3
  MISC_FEATURE (19)..(19): Xaa = a lysine residue covalently linked to a lipophilic group via its side chain
EFCIXQDWGEHRAXEAXXX

SEQ ID NO: 733 - protein, 21 aa, Artificial Sequence
  compstatin analogue
  MISC_FEATURE (4)..(4): Cysteine whose side chain forms a lanthionine bridge
  MISC_FEATURE (6)..(6): Xaa = 1-Me-Trp
  MISC_FEATURE (10)..(10): Xaa = Sar
  MISC_FEATURE (14)..(14): Alanine whose side chain forms a lanthionine bridge
  MISC_FEATURE (15)..(15): Xaa = Sar
  MISC_FEATURE (19)..(20): Xaa = Peg3
  MISC_FEATURE (21)..(21): Xaa = a lysine residue covalently linked to a lipophilic group via its side chain
GEFCIXQDWXEHRAXEAEXXX

SEQ ID NO: 734 - protein, 22 aa, Artificial Sequence
  compstatin analogue
  MISC_FEATURE (4)..(4): Cysteine whose side chain forms a lanthionine bridge
  MISC_FEATURE (6)..(6): Xaa = 1-Me-Trp
  MISC_FEATURE (10)..(10): Xaa = Sar
  MISC_FEATURE (14)..(14): Alanine whose side chain forms a lanthionine bridge
  MISC_FEATURE (15)..(15): Xaa = Sar
  MISC_FEATURE (19)..(19): Xaa = Peg3
  MISC_FEATURE (22)..(22): Xaa = a lysine residue covalently linked to a lipophilic group via its side chain
SEFCIXQDWXEHRXXEGEXESX

SEQ ID NO: 735 - protein, 22 aa, Artificial Sequence
  compstatin analogue
  MISC_FEATURE (4)..(4): Cysteine whose side chain forms a lanthionine bridge
  MISC_FEATURE (6)..(6): Xaa = 1-Me-Trp
  MISC_FEATURE (14)..(14): Alanine whose side chain forms a lanthionine bridge
  MISC_FEATURE (15)..(15): Xaa = Sar
  MISC_FEATURE (19)..(19): Xaa = Peg3
  MISC_FEATURE (22)..(22): Xaa = a lysine residue covalently linked to a lipophilic group via its side chain
GEFCIXQEWGEHRAXEGEXESX

SEQ ID NO: 736 - protein, 19 aa, Artificial Sequence
  compstatin analogue
  MISC_FEATURE (3)..(3): Cysteine whose side chain forms a lanthionine bridge
  MISC_FEATURE (5)..(5): Xaa = 1-Me-Trp
  MISC_FEATURE (13)..(13): Alanine whose side chain forms a lanthionine bridge
  MISC_FEATURE (14)..(14): Xaa = Sar
  MISC_FEATURE (17)..(18): Xaa = Peg3
  MISC_FEATURE (19)..(19): Xaa = a lysine residue covalently linked to a lipophilic group via its side chain
EFCIXQEWGEHRAXEAXXX

SEQ ID NO: 737 - protein, 19 aa, Artificial Sequence
  compstatin analogue
  MISC_FEATURE (4)..(4): Xaa = Homocysteine whose side chain forms a cystathionine bridge
  MISC_FEATURE (6)..(6): Xaa = 1-Me-Trp
  MISC_FEATURE (14)..(14): Alanine whose side chain forms a cystathionine bridge
  MISC_FEATURE (15)..(15): Xaa = Sar
  MISC_FEATURE (19)..(19): Xaa = a lysine residue covalently linked to a lipophilic group via its side chain
SEYXIXQDWGEHRAXEGKX

SEQ ID NO: 738 - protein, 19 aa, Artificial Sequence
  compstatin analogue
  MISC_FEATURE (4)..(4): Alanine whose side chain forms a cystathionine bridge
  MISC_FEATURE (6)..(6): Xaa = 1-Me-Trp
  MISC_FEATURE (14)..(14): Xaa = Homocysteine whose side chain forms a cystathionine bridge
  MISC_FEATURE (15)..(15): Xaa = Sar
  MISC_FEATURE (19)..(19): Xaa = a lysine residue covalently linked to a lipophilic group via its side chain
SEYAIXQDWGEHRXXEGKX

SEQ ID NO: 739 - protein, 19 aa, Artificial Sequence
  compstatin analogue
  MISC_FEATURE (4)..(4): Cysteine whose side chain forms a lanthionine bridge
  MISC_FEATURE (6)..(6): Xaa = 1-Me-Trp
  MISC_FEATURE (14)..(14): Alanine whose side chain forms a lanthionine bridge
  MISC_FEATURE (15)..(15): Xaa = Sar
  MISC_FEATURE (19)..(19): Xaa = a lysine residue covalently linked to a lipophilic group via its side chain
SEYCIXQDWGEHRAXEGKX

SEQ ID NO: 740 - protein, 16 aa, Artificial Sequence
  compstatin analogue
  DISULFID (2)..(12)
ICIWQDWGEHRCTEGE

SEQ ID NO: 741 - protein, 19 aa, Artificial Sequence
  compstatin analogue
  DISULFID (4)..(14)
  MISC_FEATURE (6)..(6): Xaa = 1-Me-Trp
  MISC_FEATURE (15)..(15): Xaa = Sar
  MISC_FEATURE (19)..(19): Xaa = a lysine residue covalently linked to a lipophilic group via its side chain
SEFCIXQDWGEHRCXEGAX

SEQ ID NO: 742 - protein, 13 aa, Artificial Sequence
  4W9A
  DISULFID (2)..(12)
ICVWQDWGAHRCT

SEQ ID NO: 743 - protein, 14 aa, Artificial Sequence
  Cp40
  MISC_FEATURE (1)..(1): Xaa = d-Tyrosine
  DISULFID (3)..(13)
  MISC_FEATURE (5)..(5): Xaa = 1-Me-Trp
  MISC_FEATURE (9)..(9): Xaa = Sar
  MISC_FEATURE (14)..(14): Xaa = N-Me-Ile
XICVXQDWXAHRCX

SEQ ID NO: 744 - protein, 13 aa, Artificial Sequence
  Compound A
  DISULFID (2)..(12)
ICVWQDWGEHRCT

SEQ ID NO: 745 - protein, 13 aa, Artificial Sequence
  Compound B
  DISULFID (2)..(12)
ICVWQDWGSHRCT

SEQ ID NO: 746 - protein, 17 aa, Artificial Sequence
  Compound C
  DISULFID (6)..(16)
ESSAICVWQDWGEHRCT

SEQ ID NO: 747 - protein, 17 aa, Artificial Sequence
  Compound D
  DISULFID (2)..(12)
ICVWQDWGEHRCTGAES

SEQ ID NO: 748 - protein, 12 aa, Artificial Sequence
  Compound E
  DISULFID (2)..(12)
ICVWQDWGAHSC

SEQ ID NO: 749 - protein, 13 aa, Artificial Sequence
  Compound F
  DISULFID (2)..(12)
ICVWQDWGEHSCT

SEQ ID NO: 750 - protein, 13 aa, Artificial Sequence
  Compound G
  DISULFID (2)..(12)
ICVWQDWGEHRCS

SEQ ID NO: 751 - protein, 18 aa, Artificial Sequence
  Compound H
  DISULFID (6)..(16)
  MISC_FEATURE (17)..(17): Xaa = Sar
EGSAICVWQDWGEHRCXE

SEQ ID NO: 752 - protein, 16 aa, Artificial Sequence
  Compound J
  DISULFID (2)..(12)
ICVWQDWGEHRCTEGE

SEQ ID NO: 753 - protein, 13 aa, Artificial Sequence
  Compound 2
  DISULFID (2)..(12)
ICIWQDWGEHRCT

SEQ ID NO: 754 - protein, 17 aa, Artificial Sequence
  Compound 3
  DISULFID (6)..(16)
ESSAICIWQDWGEHRCT

SEQ ID NO: 755 - protein, 13 aa, Artificial Sequence
  Compound 4
  DISULFID (2)..(12)
  MISC_FEATURE (4)..(4): Xaa = 1-Me-Trp
ICIXQDWGEHRCT

SEQ ID NO: 756 - protein, 13 aa, Artificial Sequence
  Compound 5
  DISULFID (2)..(12)
ICIWQDWGKHRCT

SEQ ID NO: 757 - protein, 13 aa, Artificial Sequence
  Compound 6
  DISULFID (2)..(12)
ICIWQDWGSHRCT

SEQ ID NO: 758 - protein, 13 aa, Artificial Sequence
  Compound 7
  DISULFID (2)..(12)
ICIWQKWGEHRCT

SEQ ID NO: 759 - protein, 17 aa, Artificial Sequence
  Compound 8
  DISULFID (2)..(12)
ICIWQKWGAHRCTGAES

SEQ ID NO: 760 - protein, 13 aa, Artificial Sequence
  Compound 9
  DISULFID (2)..(12)
YCIWQDWGEHRCT

SEQ ID NO: 761 - protein, 17 aa, Artificial Sequence
  Compound 10
  DISULFID (6)..(16)
ESSAYCIWQDWGEHRCT

SEQ ID NO: 762 - protein, 13 aa, Artificial Sequence
  Compound 11
  MISC_FEATURE (1)..(1): Xaa = Sar
  DISULFID (2)..(12)
XCIWQDWGEHRCT

SEQ ID NO: 763 - protein, 13 aa, Artificial Sequence
  Compound 12
  DISULFID (2)..(12)
ICIWQDWGAHRCE

SEQ ID NO: 764 - protein, 13 aa, Artificial Sequence
  Compound 13
  DISULFID (2)..(12)
  MISC_FEATURE (13)..(13): Xaa = Sar
ICIWQDWGEHRCX

SEQ ID NO: 765 - protein, 21 aa, Artificial Sequence
  Compound 14
  DISULFID (6)..(16)
ESSAICIWQDWGEHRCTGAES

SEQ ID NO: 766 - protein, 17 aa, Artificial Sequence
  Compound 15
  DISULFID (2)..(12)
ICIWQDWGEHRCTGAES

SEQ ID NO: 767 - protein, 13 aa, Artificial Sequence
  Compound 16
  DNA_BIND (2)..(12)
ICIWQEWGEHRCT

SEQ ID NO: 768 - protein, 13 aa, Artificial Sequence
  Compound 17
  DISULFID (2)..(12)
ICIWQDWGDHRCT

SEQ ID NO: 769 - protein, 13 aa, Artificial Sequence
  Compound 18
  MISC_FEATURE (2)..(12)
  DISULFID (2)..(12)
ICIWQDWGRHRCT

SEQ ID NO: 770 - protein, 13 aa, Artificial Sequence
  Compound 19
  DISULFID (2)..(12)
ICIWQDWGAHSCT

SEQ ID NO: 771 - protein, 13 aa, Artificial Sequence
  Compound 20
  DISULFID (2)..(12)
ICIWQDWGEHSCT

SEQ ID NO: 772 - protein, 13 aa, Artificial Sequence
  Compound 21
  DISULFID (2)..(12)
ICIWQDWGEHRCS

SEQ ID NO: 773 - protein, 13 aa, Artificial Sequence
  Compound 22
  DISULFID (2)..(12)
ICIWQDWGEHRCE

SEQ ID NO: 774 - protein, 13 aa, Artificial Sequence
  Compound 23
  DISULFID (2)..(12)
FCIWQDWGEHRCT

SEQ ID NO: 775 - protein, 15 aa, Artificial Sequence
  compstatin analogue
  DISULFID (2)..(12)
ICIWQDWGEHRCTEA

SEQ ID NO: 776 - protein, 14 aa, Artificial Sequence
  compstatin analogue
  DISULFID (2)..(12)
ICIWQDWGEHRCTE

SEQ ID NO: 777 - protein, 15 aa, Artificial Sequence
  compstatin analogue
  DISULFID (2)..(12)
ICIWQDWGEHRCEGE

SEQ ID NO: 778 - protein, 18 aa, Artificial Sequence
  compstatin analogue
  DISULFID (2)..(12)
  MISC_FEATURE (17)..(17): Xaa = Sar
EGSAICIWQDWGEHRCXE

SEQ ID NO: 779 - protein, 17 aa, Artificial Sequence
  compstatin analogue
  DISULFID (6)..(16)
EGSAICIWQDWGEHRCT

SEQ ID NO: 780 - protein, 16 aa, Artificial Sequence
  compstatin analogue
  DISULFID (5)..(15)
EGEICIWQDWGEHRCT

SEQ ID NO: 781 - protein, 16 aa, Artificial Sequence
  compstatin analogue
  DISULFID (5)..(15)
ESEICIWQDWGEHRCT

SEQ ID NO: 782 - protein, 17 aa, Artificial Sequence
  compstatin analogue
  DISULFID (4)..(14)
SEICIWQDWGEHRCTEA

SEQ ID NO: 783 - protein, 15 aa, Artificial Sequence
  compstatin analogue
  DISULFID (3)..(13)
EICIWQDWGEHRCTE

SEQ ID NO: 784 - protein, 17 aa, Artificial Sequence
  compstatin analogue
  DISULFID (3)..(13)
EICIWQDWGEHRCTEGE

SEQ ID NO: 785 - protein, 18 aa, Artificial Sequence
  compstatin analogue
  DISULFID (5)..(15)
EGEICIWQDWGEHRCEGE

SEQ ID NO: 786 - protein, 18 aa, Artificial Sequence
  compstatin analogue
  DISULFID (5)..(15)
ESEICIWQDWGEHRCEGE

SEQ ID NO: 787 - protein, 19 aa, Artificial Sequence
  compstatin analogue
  DISULFID (5)..(15)
KEKICIWQDWGEHRCTEKE

SEQ ID NO: 788 - protein, 19 aa, Artificial Sequence
  compstatin analogue
  DISULFID (5)..(15)
EKGICIWQDWGEHRCTEKP

SEQ ID NO: 789 - protein, 16 aa, Artificial Sequence
  compstatin analogue
  DISULFID (2)..(12)
ICIWQDWGEHRCTEGK

SEQ ID NO: 790 - protein, 17 aa, Artificial Sequence
  compstatin analogue
  DISULFID (5)..(15)
  MISC_FEATURE (16)..(16): Xaa = Sar
GSAICIWQDWGEHRCXE

SEQ ID NO: 791 - protein, 16 aa, Artificial Sequence
  compstatin analogue
  DISULFID (4)..(14)
  MISC_FEATURE (15)..(15): Xaa = Sar
SAICIWQDWGEHRCXE

SEQ ID NO: 792 - protein, 17 aa, Artificial Sequence
  compstatin analogue
  DISULFID (4)..(14)
SAICIWQDWGEHRCTEG

SEQ ID NO: 793 - protein, 16 aa, Artificial Sequence
  compstatin analogue
  DISULFID (2)..(12)
FCIWQDWGEHRCTGAE

SEQ ID NO: 794 - protein, 20 aa, Artificial Sequence
  compstatin analogue
  DISULFID (6)..(16)
  MISC_FEATURE (17)..(17): Xaa = Sar
EGSAICIWQDWGEHRCXEGE

SEQ ID NO: 795 - protein, 18 aa, Artificial Sequence
  compstatin analogue
  DISULFID (6)..(16)
  MISC_FEATURE (17)..(17): Xaa = Sar
EGSAFCIWQDWGEHRCXE

SEQ ID NO: 796 - protein, 17 aa, Artificial Sequence
  compstatin analogue
  DISULFID (6)..(16)
ESSAICIWQDWGAHRCT

SEQ ID NO: 797 - protein, 17 aa, Artificial Sequence
  compstatin analogue
  DISULFID (2)..(12)
ICIWQDWGAHRCTGAES

SEQ ID NO: 798 - protein, 14 aa, Artificial Sequence
  compstatin analogue
  MISC_FEATURE (1)..(1): Xaa = d-tyrosene
  DISULFID (3)..(13)
  MISC_FEATURE (5)..(5): Xaa = 1-Me-Trp
  MISC_FEATURE (9)..(9): Xaa = Sar
  MISC_FEATURE (14)..(14): Xaa = N-Me-Ile
XICIXQDWXAHRCX

SEQ ID NO: 799 - protein, 18 aa, Artificial Sequence
  compstatin analogue
  DISULFID (6)..(16)
  MISC_FEATURE (8)..(8): Xaa = 1-Me-Trp
  MISC_FEATURE (17)..(17): Xaa = Sar
EGSAICIXQDWGEHRCXE

SEQ ID NO: 800 - protein, 18 aa, Artificial Sequence
  compstatin analogue
  DISULFID (6)..(16)
  MISC_FEATURE (8)..(8): Xaa = 2-Nal
  MISC_FEATURE (17)..(17): Xaa = Sar
EGSAICIXQDWGEHRCXE

SEQ ID NO: 801 - protein, 17 aa, Artificial Sequence
  compstatin analogue
  DISULFID (2)..(12)
  MISC_FEATURE (4)..(4): X=1-Me-Trp
ICIXQDWGEHRCTGAES

SEQ ID NO: 802 - protein, 17 aa, Artificial Sequence
  compstatin analogue
  DISULFID (2)..(12)
  MISC_FEATURE (4)..(4): X=2-Nal
ICIXQDWGEHRCTGAES

SEQ ID NO: 803 - protein, 18 aa, Artificial Sequence
  compstatin analogue
  DISULFID (6)..(16)
  MISC_FEATURE (8)..(8): X=1-Me-Trp
  MISC_FEATURE (17)..(17): X=Sar
EGSAFCIXQDWGEHRCXE

SEQ ID NO: 804 - protein, 18 aa, Artificial Sequence
  compstatin analogue
  DISULFID (6)..(16)
  MISC_FEATURE (8)..(8): X=1-Me-Trp
  MISC_FEATURE (17)..(17): X=Sar
EGSAYCIXQDWGEHRCXE

SEQ ID NO: 805 - protein, 18 aa, Artificial Sequence
  compstatin analogue
  DISULFID (6)..(16)
EGSAICIWQDWGEHRCTE

SEQ ID NO: 806 - protein, 18 aa, Artificial Sequence
  compstatin analogue
  DISULFID (6)..(16)
  MISC_FEATURE (8)..(8): X= 1-Nal
EGSAFCIXQDWGEHRCTE

SEQ ID NO: 807 - protein, 18 aa, Artificial Sequence
  compstatin analogue
  DISULFID (6)..(16)
  MISC_FEATURE (8)..(8): X=1-Me-Trp
EGSAFCIXQDWGEHRCTE

SEQ ID NO: 808 - protein, 19 aa, Artificial Sequence
  compstatin analogue
  DISULFID (6)..(16)
  MISC_FEATURE (8)..(8): X=1-Me-Trp
EGSAFCIXQDWGEHRCEGE

SEQ ID NO: 809 - protein, 18 aa, Artificial Sequence
  compstatin analogue
  DISULFID (6)..(16)
  MISC_FEATURE (8)..(8): X=1-Me-Trp
EGSAYCIXQDWGEHRCTE

SEQ ID NO: 810 - protein, 18 aa, Artificial Sequence
  compstatin analogue
  DISULFID (6)..(16)
  MISC_FEATURE (8)..(8): X=2-Nal
EGSAFCIXQDWGEHRCTE

SEQ ID NO: 811 - protein, 17 aa, Artificial Sequence
  compstatin analogue
  DISULFID (2)..(12)
  MISC_FEATURE (4)..(4): X=2-Nal
FCIXQDWGEHRCTGAES

SEQ ID NO: 812 - protein, 17 aa, Artificial Sequence
  compstatin analogue
  DISULFID (2)..(12)
  MISC_FEATURE (4)..(4): X=1-Me-Trp
YCIXQDWGEHRCTGAES

SEQ ID NO: 813 - protein, 17 aa, Artificial Sequence
  compstatin analogue
  DISULFID (2)..(12)
  MISC_FEATURE (4)..(4): X=1-Nal
FCIXQDWGEHRCTGAES

SEQ ID NO: 814 - protein, 17 aa, Artificial Sequence
  compstatin analogue
  DISULFID (2)..(12)
  MISC_FEATURE (4)..(4): X=2-Nal
FCIXQDWGEHRCTGAES

SEQ ID NO: 815 - protein, 17 aa, Artificial Sequence
  compstatin analogue
  DISULFID (2)..(12)
  MISC_FEATURE (4)..(4): X=2-Nal
YCIXQDWGEHRCTGAES

SEQ ID NO: 816 - protein, 17 aa, Artificial Sequence
  compstatin analogue
  DISULFID (2)..(12)
YCIWQDWGEHRCTGAES

SEQ ID NO: 817 - protein, 19 aa, Artificial Sequence
  compstatin analogue
  DISULFID (4)..(14)
  MISC_FEATURE (6)..(6): X=2-Me-Trp
SEFCIXQDWGEHRCTGAES

SEQ ID NO: 818 - protein, 17 aa, Artificial Sequence
  compstatin analogue
  DISULFID (2)..(12)
  MISC_FEATURE (4)..(4): X=1-Me-Trp
YCIXQDWGEHRCTEAGS

SEQ ID NO: 819 - protein, 17 aa, Artificial Sequence
  compstatin analogue
  DISULFID (2)..(12)
  MISC_FEATURE (4)..(4): X=1-Me-Trp
YCIXQDWGEHRCTESGA

SEQ ID NO: 820 - protein, 18 aa, Artificial Sequence
  compstatin analogue
  DISULFID (6)..(16)
  MISC_FEATURE (8)..(8): X=1-Me-Trp
  MISC_FEATURE (17)..(17): X=Sar
EGSAYCIXQEWGEHRCXE

SEQ ID NO: 821 - protein, 17 aa, Artificial Sequence
  compstatin analogue
  DISULFID (4)..(14)
  MISC_FEATURE (6)..(6): X=1-Me-Trp
  MISC_FEATURE (15)..(15): X=Sar
SEYCIXQDWGEHRCXEA

SEQ ID NO: 822 - protein, 17 aa, Artificial Sequence
  compstatin analogue
  DISULFID (2)..(12)
  MISC_FEATURE (4)..(4): X=1-Me-Trp
  MISC_FEATURE (8)..(8): X=Sar
FCIXQDWXEHRCTGAES

SEQ ID NO: 823 - protein, 19 aa, Artificial Sequence
  compstatin analogue
  MISC_FEATURE (1)..(1): X=d-Tyrosene
  DISULFID (4)..(14)
  MISC_FEATURE (6)..(6): X=1-Me-Trp
  MISC_FEATURE (10)..(10): X=Sar
XYFCIXQDWXEHRCTGAES

SEQ ID NO: 824 - protein, 19 aa, Artificial Sequence
  compstatin analogue
  DISULFID (4)..(14)
  MISC_FEATURE (6)..(6): X=1-Me-Trp
  MISC_FEATURE (15)..(15): X=Sar
SEFCIXQDWGEHRCXGAES

SEQ ID NO: 825 - protein, 17 aa, Artificial Sequence
  compstatin analogue
  DISULFID (4)..(14)
  MISC_FEATURE (6)..(6): X=1-Me-Trp
  MISC_FEATURE (15)..(15): X=Sar
SEFCIXQDWGEHRCXEA

SEQ ID NO: 826 - protein, 17 aa, Artificial Sequence
  compstatin analogue
  DISULFID (4)..(14)
  MISC_FEATURE (6)..(6): X=1-Me-Trp
  MISC_FEATURE (10)..(10): X=Sar
  MISC_FEATURE (15)..(15): X=Sar
SEFCIXQDWXEHRCXEA

SEQ ID NO: 827 - protein, 17 aa, Artificial Sequence
  compstatin analogue
  DISULFID (4)..(14)
  MISC_FEATURE (6)..(6): X=1-Me-Trp
  MISC_FEATURE (10)..(10): X=Sar
SEFCIXQDWXEHRCTEA

SEQ ID NO: 828 - protein, 16 aa, Artificial Sequence
  compstatin analogue
  DISULFID (4)..(14)
  MISC_FEATURE (6)..(6): X=1-Me-Trp
  MISC_FEATURE (15)..(15): X=Sar
SEFCIXQDWGEHRCXE

SEQ ID NO: 829 - protein, 16 aa, Artificial Sequence
  compstatin analogue
  DISULFID (4)..(14)
  MISC_FEATURE (6)..(6): Xaa = 1-Me-Trp
  MISC_FEATURE (10)..(10): Xaa = Sar
  MISC_FEATURE (15)..(15): Xaa = Sar
SEFCIXQDWXEHRCXE

SEQ ID NO: 830 - protein, 16 aa, Artificial Sequence
  compstatin analogue
  DISULFID (3)..(13)
  MISC_FEATURE (5)..(5): Xaa = 1-Me-Trp
  MISC_FEATURE (14)..(14): Xaa = Sar
EFCIXQDWGEHRCXEA

SEQ ID NO: 831 - protein, 17 aa, Artificial Sequence
  compstatin analogue
  MISC_FEATURE (3)..(3): Xaa = Sar
  DISULFID (4)..(14)
  MISC_FEATURE (6)..(6): Xaa = 1-Me-Trp
  MISC_FEATURE (15)..(15): Xaa = Sar
SEXCIXQDWGEHRCXEA

SEQ ID NO: 832 - protein, 17 aa, Artificial Sequence
  compstatin analogue
  MISC_FEATURE (3)..(3): Xaa = Sar
  DISULFID (4)..(14)
  MISC_FEATURE (6)..(6): Xaa = 1-Me-Trp
SEXCIXQDWGEHRCTEA

SEQ ID NO: 833 - protein, 17 aa, Artificial Sequence
  compstatin analogue
  DISULFID (4)..(14)
  MISC_FEATURE (6)..(6): Xaa = 1-Me-Trp
  MISC_FEATURE (15)..(15): Xaa = Sar
SEFCIXQEWGEHRCXEA

SEQ ID NO: 834 - protein, 17 aa, Artificial Sequence
  compstatin analogue
  DISULFID (4)..(14)
  MISC_FEATURE (6)..(6): X=1-Me-Trp
SEFCIXQDWGEHRCSEA

SEQ ID NO: 835 - protein, 15 aa, Artificial Sequence
  compstatin analogue
  DISULFID (3)..(13)
  MISC_FEATURE (5)..(5): Xaa = 1-Me-Trp
EFCIXQDWGEHRCES

SEQ ID NO: 836 - protein, 17 aa, Artificial Sequence
  compstatin analogue
  DISULFID (4)..(14)
  MISC_FEATURE (6)..(6): X=1-Me-Trp
  MISC_FEATURE (15)..(15): X=Sar
SEFCIXQDWGEHKCXEA

SEQ ID NO: 837 - protein, 17 aa, Artificial Sequence
  compstatin analogue
  DISULFID (4)..(14)
  MISC_FEATURE (6)..(6): Xaa = 1-Me-Trp
  MISC_FEATURE (15)..(15): Xaa = Sar
GEFCIXQDWGEHRCXEA

SEQ ID NO: 838 - protein, 17 aa, Artificial Sequence
  compstatin analogue
  MISC_FEATURE (3)..(3): Xaa = Sar
  DISULFID (4)..(14)
  MISC_FEATURE (6)..(6): Xaa = 1-Me-Trp
GEXCIXQDWGEHRCTEA

SEQ ID NO: 839 - protein, 17 aa, Artificial Sequence
  compstatin analogue
  MISC_FEATURE (3)..(3): Xaa = Sar
  DISULFID (4)..(14)
  MISC_FEATURE (6)..(6): Xaa = 1-Me-Trp
  MISC_FEATURE (10)..(10): Xaa = Sar
SEXCIXQEWXEHRCTEA

SEQ ID NO: 840 - protein, 17 aa, Artificial Sequence
  compstatin analogue
  MISC_FEATURE (3)..(3): Xaa = Sar
  DISULFID (4)..(14)
  MISC_FEATURE (6)..(6): Xaa = 1-Me-Trp
  MISC_FEATURE (15)..(15): Xaa = Sar
SEXCIXQEWGEHRCXEA

SEQ ID NO: 841 - protein, 16 aa, Artificial Sequence
  compstatin analogue
  MISC_FEATURE (1)..(1): Xaa = d-tyrosene
  MISC_FEATURE (2)..(2): Xaa = Sar
  DISULFID (3)..(13)
  MISC_FEATURE (5)..(5): Xaa = 1-Me-Trp
XXCIXQDWGEHRCTEA

SEQ ID NO: 842 - protein, 16 aa, Artificial Sequence
  compstatin analogue
  DISULFID (2)..(12)
  MISC_FEATURE (16)..(16): Xaa = a lysine residue covalently linked to a lipophilic group via its side chain
ICIWQDWGEHRCTEGX

SEQ ID NO: 843 - protein, 17 aa, Artificial Sequence
  compstatin analogue
  DISULFID (2)..(12)
  MISC_FEATURE (17)..(17): Xaa = a lysine residue covalently linked to a lipophilic group via its side chain
ICIWQDWGEHRCTEGEX

SEQ ID NO: 844 - protein, 20 aa, Artificial Sequence
  compstatin analogue
  DISULFID (6)..(16)
ESSAICIWQDWGEHRCTEGE

SEQ ID NO: 845 - protein, 20 aa, Artificial Sequence
  compstatin analogue
  MISC_FEATURE (1)..(1): Xaa = a lysine residue covalently linked to a lipophilic group via its side chain
  DISULFID (6)..(16)
XGSAICIWQDWGEHRCTEGE

SEQ ID NO: 846 - protein, 20 aa, Artificial Sequence
  compstatin analogue
  DISULFID (6)..(16)
  MISC_FEATURE (20)..(20): Xaa = a lysine residue covalently linked to a lipophilic group via its side chain
EGSAICIWQDWGEHRCTEGX

SEQ ID NO: 847 - protein, 18 aa, Artificial Sequence
  compstatin analogue
  DISULFID (2)..(12)
  MISC_FEATURE (4)..(4): Xaa = 1-Me-Trp
  MISC_FEATURE (18)..(18): Xaa = a lysine residue covalently linked to a lipophilic group via its side chain
FCIXQDWGEHRCTGAESX

SEQ ID NO: 848 - protein, 18 aa, Artificial Sequence
  compstatin analogue
  DISULFID (6)..(16)
  MISC_FEATURE (8)..(8): Xaa = 1-Me-Trp
  MISC_FEATURE (15)..(15): Xaa = a lysine residue covalently linked to a lipophilic group via its side chain
  MISC_FEATURE (17)..(17): Xaa = Sar
EGSAYCIXQDWGEHXCXE

SEQ ID NO: 849 - protein, 20 aa, Artificial Sequence
  compstatin analogue
  DISULFID (6)..(16)
  MISC_FEATURE (8)..(8): Xaa = 1-Me-Trp
  MISC_FEATURE (17)..(17): Xaa = Sar
  MISC_FEATURE (20)..(20): Xaa = a lysine residue covalently linked to a lipophilic group via its side chain
EGSAYCIXQDWGEHRCXEGX

SEQ ID NO: 850 - protein, 17 aa, Artificial Sequence
  compstatin analogue
  DISULFID (4)..(14)
  MISC_FEATURE (6)..(6): Xaa = 1-Me-Trp
  MISC_FEATURE (15)..(15): Xaa = Sar
  MISC_FEATURE (17)..(17): Xaa = a lysine residue covalently linked to a lipophilic group via its side chain
SAYCIXQDWGEHRCXEX

SEQ ID NO: 851 - protein, 18 aa, Artificial Sequence
  compstatin analogue
  DISULFID (6)..(16)
  MISC_FEATURE (8)..(8): Xaa = 1-Me-Trp
  MISC_FEATURE (17)..(17): Xaa = Sar
EGSEYCIXQDWGEHRCXE

SEQ ID NO: 852 - protein, 21 aa, Artificial Sequence
  compstatin analogue
  DISULFID (6)..(16)
  MISC_FEATURE (8)..(8): Xaa = 1-Me-Trp
  MISC_FEATURE (17)..(17): Xaa = Sar
  MISC_FEATURE (21)..(21): Xaa = a lysine residue covalently linked to a lipophilic group via its side chain
EGSAYCIXQDWGEHRCXEGEX

SEQ ID NO: 853 - protein, 21 aa, Artificial Sequence
  compstatin analogue
  DISULFID (6)..(16)
  MISC_FEATURE (8)..(8): Xaa = 1-Me-Trp
  MISC_FEATURE (17)..(17): Xaa = Sar
  MISC_FEATURE (21)..(21): Xaa = a lysine residue covalently linked to a lipophilic group via its side chain
EGSAYCIXQDWGEHRCXEGKX

SEQ ID NO: 854 - protein, 21 aa, Artificial Sequence
  compstatin analogue
  DISULFID (6)..(16)
  MISC_FEATURE (8)..(8): Xaa = 1-Me-Trp
  MISC_FEATURE (17)..(17): Xaa = Sar
  MISC_FEATURE (20)..(20): Xaa = gammaGlu
  MISC_FEATURE (21)..(21): Xaa = a lysine residue covalently linked to a lipophilic group via its side chain
EGSAYCIXQDWGEHRCXEKXX

SEQ ID NO: 855 - protein, 19 aa, Artificial Sequence
  compstatin analogue
  DISULFID (4)..(14)
  MISC_FEATURE (6)..(6): Xaa = 1-Me-Trp
  MISC_FEATURE (15)..(15): Xaa = Sar
  MISC_FEATURE (19)..(19): Xaa = a lysine residue covalently linked to a lipophilic group via its side chain
SEYCIXQDWGEHRCXEGAX

SEQ ID NO: 856 - protein, 21 aa, Artificial Sequence
  compstatin analogue
  DISULFID (6)..(16)
  MISC_FEATURE (8)..(8): Xaa = 1-Me-Trp
  MISC_FEATURE (17)..(17): Xaa = Sar
  MISC_FEATURE (21)..(21): Xaa = a lysine residue covalently linked to a lipophilic group via its side chain
ASGEYCIXQDWGEHRCXEGEX

SEQ ID NO: 857 - protein, 19 aa, Artificial Sequence
  compstatin analogue
  DISULFID (4)..(14)
  MISC_FEATURE (6)..(6): Xaa = 1-Me-Trp
  MISC_FEATURE (15)..(15): Xaa = Sar
  MISC_FEATURE (19)..(19): Xaa = a lysine residue covalently linked to a lipophilic group via its side chain
SEYCIXQDWGEHRCXEGEX

SEQ ID NO: 858 - protein, 19 aa, Artificial Sequence
  compstatin analogue
  DISULFID (4)..(14)
  MISC_FEATURE (5)..(5): Xaa = 1--Me-Trp
  MISC_FEATURE (15)..(15): Xaa = Sar
  MISC_FEATURE (19)..(19): Xaa = a lysine residue covalently linked to a lipophilic group via its side chain
SEYCIXQDWGEHRCXEGKX

SEQ ID NO: 859 - protein, 21 aa, Artificial Sequence
  compstatin analogue
  DISULFID (4)..(14)
  MISC_FEATURE (6)..(6): Xaa = 1-Me-Trp
  MISC_FEATURE (15)..(15): Xaa = Sar
  MISC_FEATURE (19)..(20): Xaa = Peg3
  MISC_FEATURE (21)..(21): Xaa = a lysine residue covalently linked to a lipophilic group via its side chain
SEYCIXQDWGEHRCXEGEXXX

SEQ ID NO: 860 - protein, 19 aa, Artificial Sequence
  compstatin analogue
  DISULFID (4)..(14)
  MISC_FEATURE (6)..(6): Xaa = 1-Me-Trp
  MISC_FEATURE (15)..(15): Xaa = Sar
  MISC_FEATURE (19)..(19): Xaa = a lysine residue covalently linked to a lipophilic group via its side chain
SEFCIXQEWGEHRCXEGAX

SEQ ID NO: 861 - protein, 20 aa, Artificial Sequence
  compstatin analogue
  DISULFID (4)..(14)
  MISC_FEATURE (6)..(6): Xaa = 1-Me-Trp
  MISC_FEATURE (10)..(10): Xaa = Sar
  MISC_FEATURE (15)..(15): Xaa = Sar
  MISC_FEATURE (18)..(18): Xaa = gammaGlu
  MISC_FEATURE (20)..(20): Xaa = a lysine residue covalently linked to a lipophilic group via its side chain
SEYCIXQEWXEHRCXEKXAX

SEQ ID NO: 862 - protein, 19 aa, Artificial Sequence
  compstatin analogue
  DISULFID (4)..(14)
  MISC_FEATURE (6)..(6): Xaa = 1-Me-Trp
  MISC_FEATURE (15)..(15): Xaa = Sar
  MISC_FEATURE (19)..(19): Xaa = a lysine residue covalently linked to a lipophilic group via its side chain
SEYCIXQEWGEHRCXEGAX

SEQ ID NO: 863 - protein, 21 aa, Artificial Sequence
  compstatin analogue
  DISULFID (4)..(14)
  MISC_FEATURE (6)..(6): Xaa = 1-Me-Trp
  MISC_FEATURE (15)..(15): Xaa = Sar
  MISC_FEATURE (19)..(20): Xaa = Peg3
  MISC_FEATURE (21)..(21): Xaa = a lysine residue covalently linked to a lipophilic group via its side chain
SEFCIXQDWGEHRCXEGEXXX

SEQ ID NO: 864 - protein, 21 aa, Artificial Sequence
  compstatin analogue
  DISULFID (4)..(14)
  MISC_FEATURE (6)..(6): Xaa = 1-Me-Trp
  MISC_FEATURE (15)..(15): Xaa = Sar
  MISC_FEATURE (19)..(20): Xaa = Peg3
  MISC_FEATURE (21)..(21): Xaa = a lysine residue covalently linked to a lipophilic group via its side chain
SEFCIXQEWGEHRCXEGEXXX

SEQ ID NO: 865 - protein, 21 aa, Artificial Sequence
  compstatin analogue
  DISULFID (4)..(14)
  MISC_FEATURE (6)..(6): Xaa = 1-Me-Trp
  MISC_FEATURE (15)..(15): Xaa = Sar
  MISC_FEATURE (19)..(20): Xaa = Peg3
  MISC_FEATURE (19)..(19): Xaa = a lysine residue covalently linked to a lipophilic group via its side chain
  MISC_FEATURE (21)..(21): Xaa = a lysine residue covalently linked to a lipophilic group via its side chain
SEYCIXQEWGEHRCXEGEXXX

SEQ ID NO: 866 - protein, 21 aa, Artificial Sequence
  compstatin analogue
  DISULFID (4)..(14)
  MISC_FEATURE (6)..(6): Xaa =1-Me-Trp
  MISC_FEATURE (19)..(20): Xaa = Peg3
  MISC_FEATURE (21)..(21): Xaa = a lysine residue covalently linked to a lipophilic group via its side chain
SEFCIXQDWGEHRCTEGEXXX

SEQ ID NO: 867 - protein, 21 aa, Artificial Sequence
  compstatin analogue
  DISULFID (4)..(14)
  MISC_FEATURE (6)..(6): Xaa = 1-Me-Trp
  MISC_FEATURE (15)..(15): Xaa = Sar
  MISC_FEATURE (19)..(20): Xaa = Peg3
  MISC_FEATURE (21)..(21): Xaa = a lysine residue covalently linked to a lipophilic group via its side chain
SEFCIXQDWGEHRCXEGEXXX

SEQ ID NO: 868 - protein, 22 aa, Artificial Sequence
  compstatin analogue
  DISULFID (4)..(14)
  MISC_FEATURE (6)..(6): Xaa = 1-Me-Trp
  MISC_FEATURE (15)..(15): Xaa = Sar
  MISC_FEATURE (22)..(22): Xaa = a lysine residue covalently linked to a lipophilic group via its side chain
SEFCIXQDWGEHRCXEGEGGGX

SEQ ID NO: 869 - protein, 22 aa, Artificial Sequence
  compstatin analogue
  DISULFID (4)..(14)
  MISC_FEATURE (6)..(6): Xaa = 1-Me-Trp
  MISC_FEATURE (22)..(22): Xaa = a lysine residue covalently linked to a lipophilic group via its side chain
SEFCIXQDWGEHRCTEGEGGGX

SEQ ID NO: 870 - protein, 22 aa, Artificial Sequence
  compstatin anaogue
  DISULFID (4)..(14)
  MISC_FEATURE (6)..(6): Xaa = 1-Me-Trp
  MISC_FEATURE (15)..(15): Xaa = Sar
  MISC_FEATURE (18)..(18): Xaa = gammaGlu
  MISC_FEATURE (22)..(22): Xaa = a lysine residue covalently linked to a lipophilic group via its side chain
SEFCIXQDWGEHRCXEKXGGGX

SEQ ID NO: 871 - protein, 22 aa, Artificial Sequence
  compstatin analogue
  DISULFID (4)..(14)
  MISC_FEATURE (6)..(6): Xaa = 1-Me-Trp
  MISC_FEATURE (18)..(18): Xaa = gammaGlu
  MISC_FEATURE (22)..(22): Xaa = a lysine residue covalently linked to a lipophilic group via its side chain
SEFCIXQDWGEHRCTEKXGGGX

SEQ ID NO: 872 - protein, 17 aa, Artificial Sequence
  compstatin analogue
  DISULFID (3)..(13)
  MISC_FEATURE (5)..(5): Xaa = 1-Me-Trp
  MISC_FEATURE (17)..(17): Xaa = a lysine residue covalently linked to a lipophilic group via its side chain
EFCIXQDWGEHRCEGEX

SEQ ID NO: 873 - protein, 20 aa, Artificial Sequence
  compstatin analogue
  DISULFID (4)..(14)
  MISC_FEATURE (6)..(6): Xaa = 1-Me-Trp
  MISC_FEATURE (20)..(20): Xaa = a lysine residue covalently linked to a lipophilic group via its side chain
SEFCIXQDWGEHRCTGAESX

SEQ ID NO: 874 - protein, 20 aa, Artificial Sequence
  compstatin analogue
  DISULFID (4)..(14)
  MISC_FEATURE (6)..(6): Xaa = 1-Me-Trp
  MISC_FEATURE (19)..(19): Xaa = 8-aminooctanoyl
  MISC_FEATURE (20)..(20): Xaa = a lysine residue covalently linked to a lipophilic group via its side chain
SEFCIXQDWGEHRCTEGEXX

SEQ ID NO: 875 - protein, 21 aa, Artificial Sequence
  compstatin analogue
  DISULFID (4)..(14)
  MISC_FEATURE (6)..(6): Xaa = 1-Me-Trp
  MISC_FEATURE (19)..(19): Xaa =  8-aminoctanoyl
  MISC_FEATURE (21)..(21): Xaa = a lysine residue covalently linked to a lipophilic group via its side chain
SEFCIXQDWGEHRCTEGEXEX

SEQ ID NO: 876 - protein, 20 aa, Artificial Sequence
  compstatin analogue
  DISULFID (4)..(14)
  MISC_FEATURE (6)..(6): Xaa = 1-Me-Trp
  MISC_FEATURE (15)..(15): Xaa = Sar
  MISC_FEATURE (19)..(19): Xaa = Peg3
  MISC_FEATURE (20)..(20): Xaa = a lysine residue covalently linked to a lipophilic group via its side chain
SEFCIXQDWGEHRCXEGEXX

SEQ ID NO: 877 - protein, 22 aa, Artificial Sequence
  compstatin analogue
  DISULFID (4)..(14)
  MISC_FEATURE (6)..(6): Xaa = 1-Me-Trp
  MISC_FEATURE (15)..(15): Xaa = Sar
  MISC_FEATURE (22)..(22): Xaa = a lysine residue covalently linked to a lipophilic group via its side chain
SEFCIXQDWGEHRCXEGESESX

SEQ ID NO: 878 - protein, 22 aa, Artificial Sequence
  compstatin analogue
  DISULFID (4)..(14)
  MISC_FEATURE (6)..(6): Xaa = 1-Me-Trp
  MISC_FEATURE (15)..(15): Xaa = Sar
  MISC_FEATURE (19)..(19): Xaa = Peg3
  MISC_FEATURE (22)..(22): Xaa = a lysine residue covalently linked to a lipophilic group via its side chain
SEFCIXQDWGEHRCXEGEXESX

SEQ ID NO: 879 - protein, 22 aa, Artificial Sequence
  compstatin analogue
  DISULFID (4)..(14)
  MISC_FEATURE (6)..(6): Xaa = 1-Me-Trp
  MISC_FEATURE (19)..(19): Xaa =  Peg3
  MISC_FEATURE (22)..(22): Xaa = a lysine residue covalently linked to a lipophilic group via its side chain
SEFCIXQDWGEHRCTEGEXESX

SEQ ID NO: 880 - protein, 22 aa, Artificial Sequence
  compstatin analogue
  DISULFID (4)..(14)
  MISC_FEATURE (6)..(6): Xaa = 1-Me-Trp
  MISC_FEATURE (15)..(15): Xaa = Sar
  MISC_FEATURE (19)..(21): Xaa =  Peg3
  MISC_FEATURE (22)..(22): Xaa = a lysine residue covalently linked to a lipophilic group via its side chain
SEFCIXQDWGEHRCXEGEXXXX

SEQ ID NO: 881 - protein, 19 aa, Artificial Sequence
  compstatin analogue
  DISULFID (4)..(14)
  MISC_FEATURE (6)..(6): Xaa = 1-Me-Trp
  MISC_FEATURE (10)..(10): Xaa = Sar
  MISC_FEATURE (15)..(15): Xaa = Sar
  MISC_FEATURE (17)..(18): Xaa =  Peg3
  MISC_FEATURE (19)..(19): Xaa = a lysine residue covalently linked to a lipophilic group via its side chain
SEFCIXQDWXEHRCXEXXX

SEQ ID NO: 882 - protein, 19 aa, Artificial Sequence
  compstatin analogue
  DISULFID (3)..(3)
  MISC_FEATURE (5)..(5): Xaa = 1-Me-Trp
  MISC_FEATURE (14)..(14): Xaa = Sar
  MISC_FEATURE (17)..(18): Xaa = Peg3
  MISC_FEATURE (19)..(19): Xaa = a lysine residue covalently linked to a lipophilic group via its side chain
EFCIXQDWGEHRCXEAXXX

SEQ ID NO: 883 - protein, 13 aa, Artificial Sequence
  compstatin analogue
  DISULFID (2)..(12)
  MISC_FEATURE (3)..(3): Xaa = Valine, Isoleucine, Leucine, Norvaline, Norleucine, Phehylalanine or  Beta-Homo-Isoleucine
ICXWQDWGEHRCT

SEQ ID NO: 884 - protein, 4 aa, Artificial Sequence
  N-terminal and/or C-terminal flanking sequence
  MISC_FEATURE (4)..(4): Xaa = Peg3
EGEX

SEQ ID NO: 885 - protein, 5 aa, Artificial Sequence
  N-terminal and/or C-terminal flanking sequence
  MISC_FEATURE (4)..(5): Xaa = Peg3
EGEXX

SEQ ID NO: 886 - protein, 6 aa, Artificial Sequence
  N-terminal and/or C-terminal flanking sequence
  MISC_FEATURE (4)..(6): Xaa = Peg3
EGEXXX

SEQ ID NO: 887 - protein, 5 aa, Artificial Sequence
  N-terminal and/or C-terminal flanking sequence
  MISC_FEATURE (4)..(5): Xaa = Peg3
EAEXX

SEQ ID NO: 888 - protein, 4 aa, Artificial Sequence
  N-terminal and/or C-terminal flanking sequence
  MISC_FEATURE (4)..(4): Xaa = 8-aminooctanoyl
EGEX

SEQ ID NO: 889 - protein, 5 aa, Artificial Sequence
  N-terminal and/or C-terminal flanking sequence
  MISC_FEATURE (4)..(4): Xaa = Peg3
EGEXK

SEQ ID NO: 890 - protein, 6 aa, Artificial Sequence
  N-terminal and/or C-terminal flanking sequence
  MISC_FEATURE (4)..(5): Xaa = Peg3
EGEXXK

SEQ ID NO: 891 - protein, 5 aa, Artificial Sequence
  N-terminal and/or C-terminal flanking sequence
  MISC_FEATURE (4)..(4): Xaa = 8-aminooctanoyl
EGEXK

SEQ ID NO: 892 - protein, 4 aa, Artificial Sequence
  N-terminal and/or C-terminal flanking sequence
  MISC_FEATURE (2)..(3): Xaa = Peg3
EXXK

SEQ ID NO: 893 - protein, 4 aa, Artificial Sequence
  N-terminal and/or C-terminal flanking sequence
  MISC_FEATURE (3)..(4): Xaa = Peg3
EAXX

SEQ ID NO: 894 - protein, 5 aa, Artificial Sequence
  N-terminal and/or C-terminal flanking sequence
  MISC_FEATURE (3)..(4): Xaa = Peg3
EAXXK

SEQ ID NO: 895 - protein, 5 aa, Artificial Sequence
  N-terminal and/or C-terminal flanking sequence
  MISC_FEATURE (4)..(4): Xaa = 8-aminooctanoyl
  MISC_FEATURE (5)..(5): Xaa = a lysine residue covalently linked to a lipophilic group via its side chain
EGEXX

SEQ ID NO: 896 - protein, 6 aa, Artificial Sequence
  N-terminal and/or C-terminal flanking sequence
  MISC_FEATURE (4)..(5): Xaa = Peg3
  MISC_FEATURE (6)..(6): Xaa = a lysine residue covalently linked to a lipophilic group via its side chain
EGEXXK

SEQ ID NO: 897 - protein, 7 aa, Artificial Sequence
  N-terminal and/or C-terminal flanking sequence
  MISC_FEATURE (4)..(6): Xaa = Peg3
  MISC_FEATURE (7)..(7): Xaa = a lysine residue covalently linked to a lipophilic group via its side chain
EGEXXXX

SEQ ID NO: 898 - protein, 4 aa, Artificial Sequence
  N-terminal and/or C-terminal flanking sequence
  MISC_FEATURE (2)..(3): Xaa = Peg3
  MISC_FEATURE (4)..(4): Xaa = a lysine residue covalently linked to a lipophilic group via its side chain
EXXX

SEQ ID NO: 899 - protein, 5 aa, Artificial Sequence
  N-terminal and/or C-terminal flanking sequence
  MISC_FEATURE (3)..(4): Xaa = Peg3
  MISC_FEATURE (5)..(5): Xaa = a lysine residue covalently linked to a lipophilic group via its side chain
EAXXX

SEQ ID NO: 900 - protein, 7 aa, Artificial Sequence
  N-terminal and/or C-terminal flanking sequence
  MISC_FEATURE (4)..(6): Xaa = Peg3
EGEXXXK

SEQ ID NO: 901 - protein, 5 aa, Artificial Sequence
  side chain
  MISC_FEATURE (1)..(1): Xaa = gammaGlu
  MISC_FEATURE (3)..(3): Xaa = Peg3
  MISC_FEATURE (4)..(4): Xaa = gammaGlu
  MISC_FEATURE (5)..(5): Xaa = Peg3
XGXXX

1. A compstatin analogue represented by the formula:
Y1-R1-X1-X2-I-X4-Q-X6-W-X8-X9-H-X11-X12-X13-R2-Y2 (Formula 1)
wherein:
Y1 is hydrogen, acetyl or a lipophilic group Φ;
X1 is I, Y, F or Sar;
X4 is W, F, V, Y, 1-Me-Trp, D-Trp, N-Me-Trp, 1-For-Trp, 1-Nal, 2-Nal, 5-Me-Trp, Bpa or 2-lgl;
X6 is E, K or D;
X8 is G or Sar;
X9 is H, A, E, D, K, R or S;
X11 is R, S or K;
X13 is T, S, E, F, H, K, Sar, G, I, D, N-Me-Ile or N-Me-Thr;
X2 and X12 are residues whose side chains are linked by a thioether bond;
Y2 is NH₂, OH or a lipophilic group Φ;
R1 is absent or is a sequence of 1 to 6 amino acid residues selected from A, E, G, L, K, F, P, S, T, W, Y, R, V, Sar, εLys, γGlu, βAsp, or βAla, or a corresponding D form thereof; or Peg3, Peg4, or 8-aminooctanoyl, or derivatives thereof; and
R2 is absent or is a sequence of 1 to 8 amino acid residues selected from A, E, G, L, K, F, P, S, T, W, Y, R, V, Sar, εLys, γGlu, βAsp, or βAla, or a corresponding D form thereof; or Peg3, Peg4, or 8-aminooctanoyl, or derivatives thereof;
and wherein the compstatin analogue optionally has a lipophilic group Φ covalently linked to the side chain of one or more amino acid residues;
or a pharmaceutically acceptable salt and/or solvate thereof.

2. A compstatin analogue represented by the formula:
Y1-R1-X1-X2-l-X4-Q-X6-W-X8-X9-H-X11-X12-X13-R2-Y2 (Formula II)
wherein:
Y1 is hydrogen, acetyl, or a lipophilic group Φ;
X1 is I, Y, F or Sar;
X4 is W, V, Y, 2-Nal, 1-Nal or 1-Me-Trp;
X6 is E or D;
X8 is G or Sar;
X9 is A, E, D, K or S;
X11 is R, S or K;
X13 is T, S, E, I, Sar, K, G or N-Me-Ile;
X2 and X12 are residues whose side chains are linked by a thioether bond;
Y2 is NH₂, OH or a lipophilic group Φ;
R1 is absent or is a sequence of 1 to 6 amino acid residues selected from A, E, G, L, K, F, P, S, T, W, Y, R, V, Sar, εLys, γGlu, βAsp, or βAla, or a corresponding D form thereof, or Peg3, Peg4, or 8-aminooctanoyl, or derivatives thereof; and
R2 is absent or is a sequence of 1 to 8 amino acid residues selected from A, E, G, L, K, F, P, S, T, W, Y, R, V, Sar, εLys, γGlu, βAsp, or βAla, or a corresponding D form thereof; or Peg3 or Peg4, or 8-aminooctanoyl, or derivatives thereof;
and wherein the compstatin analogue optionally has a lipophilic group Φ covalently linked to the side chain of one or more amino acids;
or a pharmaceutically acceptable salt and/or solvate thereof.

3. A compstatin analogue represented by the formula:
Y1-R1-X1-X2-I-X4-Q-X6-W-G-X9-H-X11-X12-X13-R2-Y2 (Formula III)
wherein:
Y1 is hydrogen, acetyl or a lipophilic group Φ;
X1 is I, Y, F or Sar;
X4 is W, V, Y, 1-Nal, 2-Nal or 1-Me-Trp;
X6 is E or D;
X9 is A, E, D, K or S;
X11 is R, S or K;
X13 is T, I, S, E, K or Sar;
X2 and X12 are residues whose side chains are linked by a thioether bond;
Y2 is NH₂, OH or a lipophilic group Φ;
R1 is absent or is a sequence of 1 to 6 amino acid residues selected from A, E, G, L, K, F, P, S, T, W, Y, R, V, Sar, εLys, γGlu, βAsp, or βAla, or a corresponding D form thereof, or Peg3, Peg4, or 8-aminooctanoyl, or derivatives thereof; and
R2 is absent or is a sequence of 1 to 8 amino acid residues selected from A, E, G, L, K, F, P, S, T, W, Y, R, V, Sar, εLys, γGlu, βAsp, or βAla, or a corresponding D form thereof; or Peg3 or Peg4, or 8-aminooctanoyl, or derivatives thereof;
and wherein the compstatin analogue optionally has a lipophilic group Φ covalently linked to the side chain of one or more amino acids;
or a pharmaceutically acceptable salt and/or solvate thereof.

4. A compstatin analogue represented by the formula:
Y1-R1-X1-X2-I-X4-Q-X6-W-G-X9-H-R-X12-X13-R2-Y2 (Formula IV)
wherein:
Y1 is hydrogen, acetyl or a lipophilic group Φ;
X1 is I, Y, F or Sar;
X4 is W, V, Y, 1-Nal, 2-Nal or 1-Me-Trp;
X6 is E or D;
X9 is A, E, D, K or S;
X13 is T, S, E or Sar;
X2 and X12 are residues whose side chains are linked by a thioether bond;
Y2 is NH₂, OH or a lipophilic group (;
R1 is absent or is a sequence of 1 to 6 amino acid residues selected from A, E, G, L, K, F, P, S, T, W, Y, R, V, Sar, εLys, γGlu, (βAsp, or βAla, or a corresponding D form thereof, or Peg3, Peg4, or 8-aminooctanoyl, or derivatives thereof; and
R2 is absent or is a sequence of 1 to 8 amino acid residues selected from A, E, G, L, K, F, P, S, T, W, Y, R, V, Sar, εLys, γGlu, βAsp, or βAla, or a corresponding D form thereof; or Peg3 or Peg4, or 8-aminooctanoyl, or derivatives thereof;
and wherein the compstatin analogue optionally has a lipophilic group Φ covalently linked to the side chain of one or more amino acids;
or a pharmaceutically acceptable salt and/or solvate thereof.

5. A compstatin analogue according to any one of claims 1 to 4 comprising at least one lipophilic group Φ.

6. A compstatin analogue according to claim 5 wherein Y1 or Y2 is a lipophilic group Φ.

7. A compstatin analogue according to claim 5 or claim 6 comprising a lipophilic group Φ linked to the side chain of an amino acid residue at position X1, X11 or X13, or an amino acid residue in R1 or R2.

8. A compstatin analogue according to claim 7 wherein said amino acid residue is a lysine residue.

9. A compstatin analogue according to any one of claims 1 to 4 which does not comprise a lipophilic group Φ.

10. A compstatin analogue according to claim 1, represented by the formula:
Y1-R1-X1-X2-I-X4-Q-X6-W-G-X9-H-R-X12-X13-R2-Y2Φ(Formula V)
wherein:
Y1 is hydrogen or acetyl;
X1 is Y or F;
X4 is W, Y, 1-Me-Trp;
X6 is E or D;
X9 is A, E or K;
X13 is T, E or Sar;
X2 and X12 are residues whose side chains are linked by a thioether bond;
Y2 is NH₂ or OH;
R1 is absent or is a sequence of 1 to 6 amino acid residues selected from A, E, G, L, K, F, P, S, T, W, Y, R, V, Sar, εLys, γGlu, βAsp, or βAla, or a corresponding D form thereof, or Peg3, Peg4, or 8-aminooctanoyl, or derivatives thereof; and
R2 is absent or is a sequence of 1 to 6 amino acid residues selected from A, E, G, L, K, F, P, S, T, W, Y, R, V, Sar, εLys, γGlu, βAsp, or βAla, or a corresponding D form thereof; or Peg3 or Peg4, or 8-aminooctanoyl, or derivatives thereof;
or a pharmaceutically acceptable salt and/or solvate thereof.

11. A compstatin analogue according to claim 10, represented by the formula:
Y1-R1-X1-X2-1-[1-Me-Trp]-Q-X6-W-G-E-H-R-X12-X13-R2-Y2 (Formula VI)
wherein:
Y1 is hydrogen or acetyl;
X1 is Y or F;
X6 is E or D;
X13 is T, E or Sar;
X2 and X12 are residues whose side chains are linked by a thioether bond;
Y2 is NH₂ or OH;
R1 is absent or is a sequence of 1 to 6 amino acid residues selected from A, E, G, L, K, F, P, S, T, W, Y, R, V, Sar, εLys, γGlu, γAsp, or βAla, or a corresponding D form thereof, or Peg3, Peg4, or 8-aminooctanoyl, or derivatives thereof; and
R2 is absent or is a sequence of 1 to 6 amino acid residues selected from A, E, G, L, K, F, P, S, T, W, Y, R, V, Sar, εLys, γGlu, βAsp, or βAla, or a corresponding D form thereof; or Peg3 or Peg4, or 8-aminooctanoyl, or derivatives thereof;
or a pharmaceutically acceptable salt and/or solvate thereof.

12. A compstatin analogue according to claim 1, represented by the formula:
Y1-R1-X1-X2-X4-Q-X6-W-X8-X9-H-X11-X12-X13-R2-Y2 (Formula VIII)
wherein:
Y1 is hydrogen, acetyl or a lipophilic group Φ;
X1 is I, Y, F or Sar;
X4 is W, V, Y, 2-Nal, 1-Nal or 1-Me-Trp;
X6 is E or D;
X8 is G or Sar;
X9 is A, E, D, K or S;
X11 is R, S or K*;
X13 is T, S, E, I, Sar, K, G or N-Me-Ile;
X2 and X12 are residues whose side chains are linked by a thioether bond;
Y2 is NH₂, OH or a lipophilic group Φ;
R1 is absent or is a sequence of 1 to 6 amino acid residues selected from A, E, G, L, K, K*, F, P, S, T, W, Y, R, V or Sar, or a corresponding D form thereof;
R2 is absent or is a sequence of 1 to 8 amino acid residues selected from A, E, G, L, K, K*, F, P, S, T, W, Y, R, V, Sar, εLys, γGlu, βAsp, or βAla, or a corresponding D form thereof; or Peg 3 or Peg4, or 8-aminooctanoyl, or derivatives thereof;
wherein * indicates that the amino acid residue bears a lipophilic group Φ covalently linked to its side chain;
and wherein the compstatin analogue comprises at least one lipophilic group Φ;
or a pharmaceutically acceptable salt and/or solvate thereof.

13. A compstatin analogue according to claim 11, represented by the formula:
Y1-R1-X1-X2-I-X4-Q-X6-W-G-X9-H-X11-X12-X13-R2-Y2 (Formula IX)
wherein:
Y1 is hydrogen, acetyl, or a lipophilic group 0);
X1 is I, Y, F or Sar;
X4 is W, V, Y, 1-Nal, 2-Nal or 1-Me-Trp;
X6 is E or D;
X9 is A, E, D, K or S;
X11 is R, S or K*;
X13 is
X2 and X12 are residues whose side chains are linked by a thioether bond;
Y2 is NH₂, OH or a lipophilic group Φ;
R1 is absent or is a sequence of 1 to 6 amino acid residues selected from A, E, G, L, K, K*, F, P, S, T, W, Y, R, V or Sar, or a corresponding D form thereof; and
R2 is absent or is a sequence of 1 to 8 amino acid residues selected from A, E, G, L, K, K* F, P, S, T, W, Y, R, V, Sar, εLys, γGlu, βAsp, or βAla, or a corresponding D form thereof; or Peg 3 or Peg4, or 8-aminooctanoyl, or derivatives thereof;
wherein * indicates that the amino acid residue bears a lipophilic group Φ covalently attached to its side chain;
and wherein the compstatin analogue comprises at least one lipophilic group Φ;
or a pharmaceutically acceptable salt and/or solvate thereof.

14. A compstatin analogue according to claim 12 or claim 13, represented by the formula:
Y1-R1-X1-X2-I-X4-Q-X6-W-G-X9-H-R-X12-X13-R2-Y2 (Formula X)
wherein:
Y1 is hydrogen, acetyl or a lipophilic group 4);
X1 is I, Y, F or Sar;
X4 is W, V, 1-Nal, 2-Nal or 1-Me-Trp;
X6 is E or D;
X9 is A, E, D, K or S;
X13 is T, S, E or Sar;
X2 and X12 are residues whose side chains are linked by a thioether bond;
Y2 is NH₂, OH or a lipophilic group Φ;
R1 is absent or is a sequence of 1 to 6 amino acid residues selected from A, E, G, L, K, K*, F, P, S, T, W, Y, R, V or Sar, or a corresponding D form thereof;
R2 is absent or is a sequence of 1 to 8 amino acid residues selected from A, E, G, L, K, K*, F, P, S, T, W, Y, R, V, Sar, εLys, γGlu, βAsp, or βAla, or a corresponding D form thereof; or
Peg3 or Peg4, or 8-aminooctanoyl, or derivatives thereof;
wherein * indicates that the amino acid residue bears a lipophilic group Φ covalently attached to its amino acid side chain;
and wherein the compstatin analogue comprises at least one lipophilic group Φ, e.g. exactly one lipophilic group (l;
or a pharmaceutically acceptable salt and/or solvate thereof.

15. A compstatin analogue according to claim 1, represented by the formula:
Y1-R1-X1-X2-l-[1-Me-Trp]-Q-X6-W-X8-E-H-R-X12-X13-R2-Y2 (Formula X1)
wherein:
Y1 is hydrogen or acetyl;
X1 is Y or F;
X6 is E or D;
X8 is G or Sar;
X13 is T, E or Sar;
X2 and X12 are residues whose side chains are linked by a thioether bond;
Y2 is NH₂ or OH;
R1 is absent or is a sequence of 1 to 6 amino acid residues selected from A, E, G, L, K, K*, F, P, S, T, W, Y, R, V or Sar, or a corresponding D form thereof;
R2 is absent or is a sequence of 1 to 8 amino acid residues selected from A, E, G, L, K, K* F, P, S, T, W, Y, R, V, Sar, εLys, γGlu, βAsp, or βAla, or a corresponding D form thereof; or
Peg3 or Peg4, or 8-aminooctanoyl, or derivatives thereof;
wherein * indicates that the amino acid residue bears a lipophilic group Φ covalently attached to its side chain;
and wherein the compstatin analogue comprises at least one lipophilic group Φ, e.g. exactly one lipophilic group Φ;
or a pharmaceutically acceptable salt and/or solvate thereof.

16. A compstatin analogue according to any one of the preceding claims wherein the 13-mer peptide portion (X1-X13) of the compstatin analogue has a sequence selected from:
[Sar]-X2-1[1-Me-Trp]QDWGEHR-X12-[Sar];
[Sar]-X2-l[1-Me-Trp]QDWGEHR-X12-T;
[Sar]-X2-l[1-Me-Trp]QEW[Sar]EHR-X12-T;
[Sar]-X2-1[1-Me-Trp]QEWGEHR-X12-[Sar];
[Sar]-X2-IWQDWGEHR-X12-T;
F-X2-l[1-Me-Trp]QDW[Sar]EHR-X12-[Sar];
F-X2-l[1-Me-Trp]QDW[Sar]EHR-X12-T;
F-X2-l[1-Me-Trp]QDWGEHK-X12-[Sar];
F-X2-l[1-Me-Trp]QDWGEHR-X12-[Sar];
F-X2-1[1-Me-Trp]QDWGEHR-X12-E;
F-X2-I[1-Me-Trp]QDWGEHR-X12-S;
F-X2-l[1-Me-Trp]QDWGEHR-X12-T;
F-X2-I[1-Me-Trp]QEWGEHR-X12-[Sar];
F-X2-I[1-Nal]QDWGEHR-X12-T;
F-X2-l[2-Nal]QDWGEHR-X12-T;
F-X2-IWQDWGEHR-X12-[Sar];
F-X2-IWQDWGEHR-X12-T;
I-X2-l[1-Me-Trp]QDW[Sar]AHR-X12-[N-Me-Ile];
I-X2-l[1-Me-Trp]QDWGEHR-X12-[Sar];
I-X2-l[1-Me-Trp]QDWGEHR-X12-T;
I-X2-I[2-NaI]QDWGEHR-X12-[Sar];
I-X2-IWQDWGAHR-X12-E;
I-X2-IWQDWGAHR-X12-T;
I-X2-IWQDWGAHS-X12-T;
I-X2-IWQDWGDHR-X12-T;
I-X2-IWQDWGEHR-X12-[Sar];
I-X2-IWQDWGEHR-X12-E;
I-X2-IWQDWGEHR-X12-S;
I-X2-IWQDWGEHR-X12-T;
I-X2-IWQDWGEHS-X12-T;
I-X2-IWQDWGKHR-X12-T;
I-X2-IWQDWGRHR-X12-T;
I-X2-IWQDWGSHR-X12-T;
I-X2-IWQEWGEHR-X12-T;
I-X2-IWQKWGAHR-X12-T;
I-X2-IWQKWGEHR-X12-T;
Y-X2-l[1-Me-Trp]QDWGEHR-X12-[Sar];
Y-X2-1[1-Me-Trp]QDWGEHR-X12-T;
Y-X2-l[1-Me-Trp]QEWGEHR-X12-[Sar];
Y-X2-l[2-NaI]QDWGEHR-X12-T;
Y-X2-IWQDWGEHR-X12-T;
Y-X2-l[1-Me-Trp]QDWGEH[K*]-X12-[Sar]; and
Y-X2-1[1-Me-Trp]QEW[Sar]EHR-X12-[Sar];
wherein X2 and X12 are residues whose side chains are linked by a thioether bond; and
wherein * indicates that the amino acid residue bears a lipophilic group Φ covalently attached to its side chain.

17. A compstatin analogue according to any one of the preceding claims wherein the side chains of the residues at positions X2 and X12 form a cystathionine (Ctt) bridge or a lanthionine bridge.

18. A compstatin analogue according to any one of the preceding claims wherein R1 has a sequence selected from:
{d}Y, EGSE, AGSE, SASE, EYSE, GSE, ASE, ESSA, KGSA, AKGE, ASGE, ASSE, ASES, GSAE, ESSE, ESGA, SEG, GES, ESS, EGSA, ESE, EGE, ESA, SAE, SGA, YLEA, GSA, KEK, EKG, ES, AE, TE, KE, GE, FE, YE, AS, SE, RS, SR, SA, GE, Y, S and E.

19. A compstatin analogue according to claim 18 comprising a lipophilic group N covalently linked to an amino acid side chain of R1.

20. A compstatin analogue according to claim 19 wherein R1 has the sequence K*GSA.

21. A compstatin analogue according to any one of the preceding claims wherein R2 has a sequence selected from:
EGASGSG, EGAGSG, EGASAG, EGAGAG, EGESGSG, EGEGSG, EGESAG, EGEGAG, EK[γGlu]AK, EK[γGlu]A, EGEGG, EGAGG, EGESS, GAESK, EGAK, EGEK, EGG, EGK, EGKK, EGS, EK, EGA, EGAK, EK[γGlu], EK[γGlu]-K, EGE[Peg3], EGE[Peg3]-K, EGE[Peg3][Peg3], EGE[Peg3][Peg3]-K, EGE[Peg3][Peg3][Peg3], EGE[Peg3][Peg3][Peg3]-K, EAE[Peg3][Peg3], EAE[Peg3][Peg3]-K, GESESE, GAESES, EGESES, EGESESK, EGE[Peg3]-ES, EGE[Peg3]-ESK, GESESE, EGE-[8-aminooctanoyl], EGE-[8-aminooctanoyl]-K, EGE-[8-aminooctanoyl]-EK, EGEGGG, EGEGGGK, EK[γGlu]GGG, EK[γGlu]GGGK, EGE-[8-aminooctanoyl]-E, E[Peg3][Peg3], E[Peg3][Peg3]-K, EA[Peg3][Peg3], EA[Peg3][Peg3]-K, GAES, EYGS, EGYA, EAGS, EAKS, EKSA, ESGA, EGGS, EGGA, ESSG, ESAG, GEES, AEES, ESEG, AEGS, ESGS, SEGA, SEG, EGK, ESG, EAG, GAE, EGEA, EGE, EA, E, S, GE, GEK, EG, EA, EKE or EKP.

22. A compstatin analogue according to claim 21 comprising a lipophilic group CD covalently linked to an amino acid side chain of R2.

23. A compstatin analogue according to claim 22 wherein R2 has the sequence EK[γGlu]AK*, EGKK*, EK[γGlu]K*, EGE[Peg3]-K*, EGESESK*, EGE[Peg3]-ESK*, EGE-[8-aminooctanoyl]-K*, EGE-[8-aminooctanoyl]-EK*, EGEGGGK*, EK[γGlu]GGGK*, EGE[Peg3][Peg3]-K*, EGE[Peg3][Peg3][Peg3]-K*, EAE[Peg3][Peg3]-K*, E[Peg3][Peg3]-K*, EA[Peg3][Peg3]-K*, GAESK*, EGAK*, EGEK*, EGK* EGE[Peg3]-ESK*, GESESEK*, GEK* or EK*.

24. A compstatin analogue according to claim 1, comprising a sequence selected from:
IhC(1)IWQDWGAHRA(1)T
IhC(1)IWQDWGEHRA(1)T
ESSAIhC(1)IWQDWGEHRA(1)T
IhC(1)l[1MeTrp]QDWGEHRA(1)T
IhC(1)IWQDWGKHRA(1)T
IhC(1)IWQDWGSHRA(1)T
IhC(1)IWQKWGEHRA(1)T
IhC(1)IWQKWGAHRA(1)TGAES
YhC(1)IWQDWGEHRA(1)T
ESSAYhC(1)IWQDWGEHRA(1)T
[Sar]hC(1)IWQDWGEHRA(1)T
IhC(1)IWQDWGAHRA(1)E
IhC(1)IWQDWGEHRA(1)[Sar]
ESSAIhC(1)IWQDWGEHRA(1)TGAES
IhC(1)IWQDWGEHRA(1)TGAES
IhC(1)IWQEWGEHRA(1)T
IhC(1)IWQDWGDHRA(1)T
IhC(1)IWQDWGRHRA(1)T
IhC(1)IWQDWGAHSA(1)T
IhC(1)IWQDWGEHSA(1)T
IhC(1)IWQDWGEHRA(1)S
IhC(1)IWQDWGEHRA(1)E
FhC(1)IWQDWGEHRA(1)T
IhC(1)IWQDWGEHRA(1)TEGE
IhC(1)IWQDWGEHRA(1)TEA
IhC(1)IWQDWGEHRA(1)TE
IhC(1)IWQDWGEHRA(1)EGE
EGSAIhC(1)IWQDWGEHRA(1)[Sar]E
EGSAIhC(1)IWQDWGEHRA(1)T
EGEIhC(1)IWQDWGEHRA(1)T
ESEIhC(1)IWQDWGEHRA(1)T
SEIhC(1)IWQDWGEHRA(1)TEA
EIhC(1)IWQDWGEHRA(1)TE
EIhC(1)IWQDWGEHRA(1)TEGE
EGEIhC(1)IWQDWGEHRA(1)EGE
ESEIhC(1)IWQDWGEHRA(1)EGE
KEKIhC(1)IWQDWGEHRA(1)TEKE
EKGIhC(1)IWQDWGEHRA(1)TEKP
IhC(1)IWQDWGEHRA(1)TEGK
GSAIhC(1)IWQDWGEHRA(1)[Sar]E
SAIhC(1)IWQDWGEHRA(1)[Sar]E
SAIhC(1)IWQDWGEHRA(1)TEG
FhC(1)IWQDWGEHRA(1)TGAE
EGSAIhC(1)IWQDWGEHRA(1)[Sar]EGE
EGSAFhC(1)IWQDWGEHRA(1)[Sar]E
ESSAIhC(1)IWQDWGAHRA(1)T
IhC(1)IWQDWGAHRA(1)TGAES
{d}YIhC(1)1[1-Me-Trp]QDW[Sar]AHRA(1)-[N-Me-Ile]
EGSAIhC(1)1[1-Me-Trp]QDWGEHRA(1)[Sar]E
EGSAIhC(1)I[2-Nal]QDWGEHRA(1)[Sar]E
IhC(1)I[1-Me-Trp]QDWGEHRA(1)TGAES
IhC(1)1[2-Nal]QDWGEHRA(1)TGAES
EGSAFhC(1)I[1-Me-Trp]QDWGEHRA(1)[Sar]E
EGSAYhC(1)1[1-Me-Trp]QDWGEHRA(1)[Sar]E
EGSAIhC(1)IWQDWGEHRA(1)TE
EGSAFhC(1)I[1-Nal]QDWGEHRA(1)TE
EGSAFhC(1)I[1-Me-Trp]QDWGEHRA(1)TE
EGSAFhC(1)I[1-Me-Trp]QDWGEHRA(1)EGE
EGSAYhC(1)I[1-Me-Trp]QDWGEHRA(1)TE
EGSAFhC(1)I[2-Nal]QDWGEHRA(1)TE
FhC(1)I[1-Me-Trp]QDWGEHRA(1)TGAES
YhC(1)I[1-Me-Trp]QDWGEHRA(1)TGAES
FhC(1)I[1-Nal]QDWGEHRA(1)TGAES
FhC(1)I[2-Nal]QDWGEHRA(1)TGAES
YhC(1)I[2-Nal]QDWGEHRA(1)TGAES
YhC(1)IWQDWGEHRA(1)TGAES
SEFhC(1)I[1-Me-Trp]QDWGEHRA(1)TGAES
YhC(1)I[1-Me-Trp]QDWGEHRA(1)TEAGS
YhC(1)1[1-Me-Trp]QDWGEHRA(1)TESGA
EGSAYhC(1)I[1-Me-Trp]QEWGEHRA(1)[Sar]E
SEYhC(1)1[1-Me-Trp]QDWGEHRA(1)[Sar]EA
FhC(1)1[1-Me-Trp]QDW[Sar]EHRA(1)TGAES
{d}YFhC(1)I[1-Me-Trp]QDW[Sar]EHRA(1)TGAES
SEFhC(1)I[1-Me-Trp]QDWGEHRA(1)[Sar]GAES
SEFhC(1)I[1-Me-Trp]QDWGEHRA(1)[Sar]EA
SEFhC(1)I[1-Me-Trp]QDW[Sar]EHRA(1)[Sar]EA
SEFhC(1)I[1-Me-Trp]QDW[Sar]EHRA(1)TEA
SEFhC(1)1[1-Me-Trp]QDWGEHRa(1)[Sar]E
SEFhC(1)1[1-Me-Trp]QDW[Sar]EHRA(1)[Sar]E
EFhC(1)I[1-Me-Trp]QDWGEHRA(1)[Sar]EA
SE[Sar]hC(1)1[1-Me-Trp]QDWGEHRA(1)[Sar]EA
SE[Sar]hC(1)1[1-Me-Trp]QDWGEHRA(1)TEA
SEFhC(1)l[1-Me-Trp]QEWGEHRA(1)[Sar]EA
SEFhC(1)1[1-Me-Trp]QDWGEHRA(1)SEA
EFhC(1)1[1-Me-Trp]QDWGEHRA(1)ES
SEFhC(1)I[1-Me-Trp]QDWGEHKA(1)[Sar]EA
GEFhC(1)I[1-Me-Trp]QDWGEHRA(1)[Sar]EA
GE[Sar]hC(1)I[1-Me-Trp]QDWGEHRA(1)TEA
SE[Sar]hC(1)I[1-Me-Trp]QEW[Sar]EHRA(1)TEA
SE[Sar]hC(1)1[1-Me-Trp]QEWGEHRA(1)[Sar]EA
{d}Y[Sar]hC(1)1[1-Me-Trp]QDWGEHRA(1)TEA
wherein the side chains of residues designated hC(1) and A(1) form a cystathionine bridge.

25. A compstatin analogue according to claim 1, comprising a sequence selected from:
IA(1)IWQDWGAHRhC(1)T
IA(1)IWQDWGEHRhC(1)T
ESSAIA(1)IWQDWGEHRhC(1)T
IA(1)l[1 MeTrp]QDWGEHRhC(1)T
IA(1)IWQDWGKHRhC(1)T
IA(1)IWQDWGSHRhC(1)T
IA(1)IWQKWGEHRhC(1)T
IA(1)IWQKWGAHRhC(1)TGAES
YA(1)IWQDWGEHRhC(1)T
ESSAYA(1)IWQDWGEHRhC(1)T
[Sar]A(1)IWQDWGEHRhC(1)T
IA(1)IWQDWGAHRhC(1)E
IA(1)IWQDWGEHRhC(1)[Sar]
ESSAIA(1)IWQDWGEHRhC(1)TGAES
IA(1)IWQDWGEHRhC(1)TGAES
IA(1)IWQEWGEHRhC(1)T
IA(1)IWQDWGDHRhC(1)T
IA(1)IWQDWGRHRhC(1)T
IA(1)IWQDWGAHShC(1)T
IA(1)IWQDWGEHShC(1)T
IA(1)IWQDWGEHRhC(1)S
IA(1)IWQDWGEHRhC(1)E
FA(1)IWQDWGEHRhC(1)T
IA(1)IWQDWGEHRhC(1)TEGE
IA(1)IWQDWGEHRhC(1)TEA
IA(1)IWQDWGEHRhC(1)TE
IA(1)IWQDWGEHRhC(1)EGE
EGSAIA(1)IWQDWGEHRhC(1)[Sar]E
EGSAIA(1)IWQDWGEHRhC(1)T
EGEIA(1)IWQDWGEHRhC(1)T
ESEIA(1)IWQDWGEHRhC(1)T
SEIA(1)IWQDWGEHRhC(1)TEA
EIA(1)IWQDWGEHRhC(1)TE
EIA(1)IWQDWGEHRhC(1)TEGE
EGEIA(1)IWQDWGEHRhC(1)EGE
ESEIA(1)IWQDWGEHRhC(1)EGE
KEKIA(1)IWQDWGEHRhC(1)TEKE
EKGIA(1)IWQDWGEHRhC(1)TEKP
IA(1)IWQDWGEHRhC(1)TEGK
GSAIA(1)IWQDWGEHRhC(1)[Sar]E
SAIA(1)IWQDWGEHRhC(1)[Sar]E
SAIA(1)IWQDWGEHRhC(1)TEG
FA(1)IWQDWGEHRhC(1)TGAE
EGSAIA(1)IWQDWGEHRhC(1)[Sar]EGE
EGSAFA(1)IWQDWGEHRhC(1)[Sar]E
ESSAIA(1)IWQDWGAHRhC(1)T
IA(1)IWQDWGAHRhC(1)TGAES
{d}YIA(1)1[1-Me-Trp]QDW[Sar]AHRhC(1)-[N-Me-Ile]
EGSAIA(1)1[1-Me-Trp]QDWGEHRhC(1)[Sar]E
EGSAIA(1)I[2-Nal]QDWGEHRhC(1)[Sar]E
IA(1)I[1-Me-Trp]QDWGEHRhC(1)TGAES
IA(1)1[2-Nal]QDWGEHRhC(1)TGAES
EGSAFA(1)I[1-Me-Trp]QDWGEHRhC(1)[Sar]E
EGSAYA(1)I[1-Me-Trp]QDWGEHRhC(1)[Sar]E
EGSAIA(1)IWQDWGEHRhC(1)TE
EGSAFA(1)I[1-Nal]QDWGEHRhC(1)TE
EGSAFA(1)I[1-Me-Trp]QDWGEHRhC(1)TE
EGSAFA(1)I[1-Me-Trp]QDWGEHRhC(1)EGE
EGSAYA(1)I[1-Me-Trp]QDWGEHRhC(1)TE
EGSAFA(1)I[2-Nal]QDWGEHRhC(1)TE
FA(1)I[1-Me-Trp]QDWGEHRhC(1)TGAES
YA(1)1[1-Me-Trp]QDWGEHRhC(1)TGAES
FA(1)I[1-Nal]QDWGEHRhC(1)TGAES
FA(1)I[2-Nal]QDWGEHRhC(1)TGAES
YA(1)1[2-Nal]QDWGEHRhC(1)TGAES
YA(1)IWQDWGEHRhC(1)TGAES
SEFA(1)1[1-Me-Trp]QDWGEHRhC(1)TGAES
YA(1)1[1-Me-Trp]QDWGEHRhC(1)TEAGS
YA(1)1[1-Me-Trp]QDWGEHRhC(1)TESGA
EGSAYA(1)1[1-Me-Trp]QEWGEHRhC(1)[Sar]E
SEYA(1)I[1-Me-Trp]QDWGEHRhC(1)[Sar]EA
FA(1)I[1-Me-Trp]QDW[Sar]EHRhC(1)TGAES
{d}YFA(1)1[1-Me-Trp]QDW[Sar]EHRhC(1)TGAES
SEFA(1)1[1-Me-Trp]QDWGEHRhC(1)[Sar]GAES
SEFA(1)1[1-Me-Trp]QDWGEHRhC(1)[Sar]EA
SEFA(1)1[1-Me-Trp]QDW[Sar]EHRhC(1)[Sar]EA
SEFA(1)1[1-Me-Trp]QDW[Sar]EHRhC(1)TEA
SEFA(1)1[1-Me-Trp]QDWGEHRhC(1)[Sar]E
SEFA(1)1[1-Me-Trp]QDW[Sar]EHRhC(1)[Sar]E
EFA(1)1[1-Me-Trp]QDWGEHRhC(1)[Sar]EA
SE[Sar]A(1)1[1-Me-Trp]QDWGEHRhC(1)[Sar]EA
SE[Sar]A(1)l[1-Me-Trp]QDWGEHRhC(1)TEA
SEFA(1)l[1-Me-Trp]QEWGEHRhC(1)[Sar]EA
SEFA(1)l[1-Me-Trp]QDWGEHRhC(1)SEA
EFA(1)1[1-Me-Trp]QDWGEHRhC(1)ES
SEFA(1)l[1-Me-Trp]QDWGEHKhC(1)[Sar]EA
GEFA(1)1[1-Me-Trp]QDWGEHRhC(1)[Sar]EA
GE[Sar]A(1)1[1-Me-Trp]QDWGEHRhC(1)TEA
SE[Sar]A(1)l[1-Me-Trp]QEW[Sar]EHRhC(1)TEA
SE[Sar]A(1)l[1-Me-Trp]QEWGEHRhC(1)[Sar]EA
{d}Y[Sar]A(1)1[1-Me-Trp]QDWGEHRhC(1)TEA
wherein the side chains of residues designated A(1) and hC(1) form a cystathionine bridge.

26. A compstatin analogue according to claim 1, comprising a sequence selected from:
IC(1)IWQDWGAHRA(1)T
IC(1)IWQDWGEHRA(1)T
ESSAIC(1)IWQDWGEHRA(1)T
IC(1)l[1MeTrp]QDWGEHRA(1)T
IC(1)IWQDWGKHRA(1)T
IC(1)IWQDWGSHRA(1)T
IC(1)IWQKWGEHRA(1)T
IC(1)IWQKWGAHRA(1)TGAES
YC(1)IWQDWGEHRA(1)T
ESSAYC(1)IWQDWGEHRA(1)T
[Sar]C(1)IWQDWGEHRA(1)T
IC(1)IWQDWGAHRA(1)E
IC(1)IWQDWGEHRA(1)[Sar]
ESSAIC(1)IWQDWGEHRA(1)TGAES
IC(1)IWQDWGEHRA(1)TGAES
IC(1)IWQEWGEHRA(1)T
IC(1)IWQDWGDHRA(1)T
IC(1)IWQDWGRHRA(1)T
IC(1)IWQDWGAHSA(1)T
IC(1)IWQDWGEHSA(1)T
IC(1)IWQDWGEHRA(1)S
IC(1)IWQDWGEHRA(1)E
FC(1)IWQDWGEHRA(1)T
IC(1)IWQDWGEHRA(1)TEGE
IC(1)IWQDWGEHRA(1)TEA
IC(1)IWQDWGEHRA(1)TE
IC(1)IWQDWGEHRA(1)EGE
EGSAIC(1)IWQDWGEHRA(1)[Sar]E
EGSAIC(1)IWQDWGEHRA(1)T
EGEIC(1)IWQDWGEHRA(1)T
ESEIC(1)IWQDWGEHRA(1)T
SEIC(1)IWQDWGEHRA(1)TEA
EIC(1)IWQDWGEHRA(1)TE
EIC(1)IWQDWGEHRA(1)TEGE
EGEIC(1)IWQDWGEHRA(1)EGE
ESEIC(1)IWQDWGEHRA(1)EGE
KEKIC(1)IWQDWGEHRA(1)TEKE
EKGIC(1)IWQDWGEHRA(1)TEKP
IC(1)IWQDWGEHRA(1)TEGK
GSAIC(1)IWQDWGEHRA(1)[Sar]E
SAIC(1)IWQDWGEHRA(1)[Sar]E
SAIC(1)IWQDWGEHRA(1)TEG
FC(1)IWQDWGEHRA(1)TGAE
EGSAIC(1)IWQDWGEHRA(1)[Sar]EGE
EGSAFC(1)IWQDWGEHRA(1)[Sar]E
ESSAIC(1)IWQDWGAHRA(1)T
IC(1)IWQDWGAHRA(1)TGAES
{d}YIC(1)1[1-Me-Trp]QDW[Sar]AHRA(1)-[N-Me-Ile]
EGSAIC(1)I[1-Me-Trp]QDWGEHRA(1)[Sar]E
EGSAIC(1)I[2-Nal]QDWGEHRA(1)[Sar]E
IC(1)1[1-Me-Trp]QDWGEHRA(1)TGAES
IC(1)1[2-Nal]QDWGEHRA(1)TGAES
EGSAFC(1)1[1-Me-Trp]QDWGEHRA(1)[Sar]E
EGSAYC(1)1[1-Me-Trp]QDWGEHRA(1)[Sar]E
EGSAIC(1)IWQDWGEHRA(1)TE
EGSAFC(1)I[1-Nal]QDWGEHRA(1)TE
EGSAFC(1)1[1-Me-Trp]QDWGEHRA(1)TE
EGSAFC(1)1[1-Me-Trp]QDWGEHRA(1)EGE
EGSAYC(1)1[1-Me-Trp]QDWGEHRA(1)TE
EGSAFC(1)1[2-Nal]QDWGEHRA(1)TE
FC(1)1[1-Me-Trp]QDWGEHRA(1)TGAES
YC(1)1[1-Me-Trp]QDWGEHRA(1)TGAES
FC(1)1[1-Nal]QDWGEHRA(1)TGAES
FC(1)1[2-Nal]QDWGEHRA(1)TGAES
YC(1)1[2-Nal]QDWGEHRA(1)TGAES
YC(1)IWQDWGEHRA(1)TGAES
SEFC(1)1[1-Me-Trp]QDWGEHRA(1)TGAES
YC(1)I[1-Me-Trp]QDWGEHRA(1)TEAGS
YC(1)1[1-Me-Trp]QDWGEHRA(1)TESGA
EGSAYC(1)1[1-Me-Trp]QEWGEHRA(1)[Sar]E
SEYC(1)1[1-Me-Trp]QDWGEHRA(1)[Sar]EA
FC(1)1[1-Me-Trp]QDW[Sar]EHRA(1)TGAES
{d}YFC(1)1[1-Me-Trp]QDW[Sar]EHRA(1)TGAES
SEFC(1)1[1-Me-Trp]QDWGEHRA(1)[Sar]GAES
SEFC(1)1[1-Me-Trp]QDWGEHRA(1)[Sar]EA
SEFC(1)1[1-Me-Trp]QDW[Sar]EHRA(1)[Sar]EA
SEFC(1)1[1-Me-Trp]QDW[Sar]EHRA(1)TEA
SEFC(1)1[1-Me-Trp]QDWGEHRA(1)[Sar]E
SEFC(1)1[1-Me-Trp]QDW[Sar]EHRA(1)[Sar]E
EFC(1)1[1-Me-Trp]QDWGEHRA(1)[Sar]EA
SE[Sar]C(1)I[1-Me-Trp]QDWGEHRA(1)[Sar]EA
SE[Sar]C(1)1[1-Me-Trp]QDWGEHRA(1)TEA
SEFC(1)1[1-Me-Trp]QEWGEHRA(1)[Sar]EA
SEFC(1)I[1-Me-Trp]QDWGEHRA(1)SEA
EFC(1)1[1-Me-Trp]QDWGEHRA(1)ES
SEFC(1)I[1-Me-Trp]QDWGEHKA(1)[Sar]EA
GEFC(1)1[1-Me-Trp]QDWGEHRA(1)[Sar]EA
GE[Sar]C(1)l[1-Me-Trp]QDWGEHRA(1)TEA
SE[Sar]C(1)l[1-Me-Trp]QEW[Sar]EHRA(1)TEA
SE[Sar]C(1)l[1-Me-Trp]QEWGEHRA(1)[Sar]EA
{d}Y[Sar]C(1)l[1-Me-Trp]QDWGEHRA(1)TEA
wherein the side chains of residues designated C(1) and A(1) form a lanthionine bridge.

27. A compstatin analogue according to claim 1 which is:
Ac-IhC(1)IWQDWGAHRA(1)T-NH2 (analogue of Compound 1)
Ac-IhC(1)IWQDWGEHRA(1)T-NH2 (analogue of Compound 2)
Ac-ESSAIhC(1)IWQDWGEHRA(1)T-NH2 (analogue of Compound 3)
Ac-IhC(1)1[1-Me-Trp]QDWGEHRA(1)T-NH2 (analogue of Compound 4)
Ac-IhC(1)IWQDWGKHRA(1)T-NH2 (analogue of Compound 5)
Ac-IhC(1)IWQDWGSHRA(1)T-NH2 (analogue of Compound 6)
Ac-IhC(1)IWQKWGEHRA(1)T-NH2 (analogue of Compound 7)
Ac-IhC(1)IWQKWGAHRA(1)TGAES-NH2 (analogue of Compound 8)
Ac-YhC(1)IWQDWGEHRA(1)T-NH2 (analogue of Compound 9)
Ac-ESSAYhC(1)IWQDWGEHRA(1)T-NH2 (analogue of Compound 10)
Ac-[Sar]hC(1)IWQDWGEHRA(1)T-NH2 (analogue of Compound 11)
Ac-IhC(1)IWQDWGAHRA(1)E-NH2 (analogue of Compound 12)
Ac-IhC(1)IWQDWGEHRA(1)[Sar]-NH2 (analogue of Compound 13)
Ac-ESSAIhC(1)IWQDWGEHRA(1)TGAES-NH2 (analogue of Compound 14)
Ac-IhC(1)IWQDWGEHRA(1)TGAES-NH2 (analogue of Compound 15)
Ac-IhC(1)IWQEWGEHRA(1)T-NH2 (analogue of Compound 16)
Ac-IhC(1)IWQDWGDHRA(1)T-NH2 (analogue of Compound 17)
Ac-IhC(1)IWQDWGRHRA(1)T-NH2 (analogue of Compound 18)
Ac-IhC(1)IWQDWGAHSA(1)T-NH2 (analogue of Compound 19)
Ac-IhC(1)IWQDWGEHSA(1)T-NH2 (analogue of Compound 20)
Ac-IhC(1)IWQDWGEHRA(1)S-NH2 (analogue of Compound 21)
Ac-IhC(1)IWQDWGEHRA(1)E-NH2 (analogue of Compound 22)
Ac-FhC(1)IWQDWGEHRA(1)T-NH2 (analogue of Compound 23)
Ac-IhC(1)IWQDWGEHRA(1)TEGE-NH2 (analogue of Compound 24)
Ac-IhC(1)IWQDWGEHRA(1)TEA-NH2 (analogue of Compound 25)
Ac-IhC(1)IWQDWGEHRA(1)TE-NH2 (analogue of Compound 26)
Ac-IhC(1)IWQDWGEHRA(1)EGE-NH2 (analogue of Compound 27)
Ac-EGSAIhC(1)IWQDWGEHRA(1)[Sar]E-NH2 (analogue of Compound 28)
Ac-EGSAIhC(1)IWQDWGEHRA(1)T-NH2 (analogue of Compound 29)
Ac-EGEIhC(1)IWQDWGEHRA(1)T-NH2 (analogue of Compound 30)
Ac-ESEIhC(1)IWQDWGEHRA(1)T-NH2 (analogue of Compound 31)
Ac-SEIhC(1)IWQDWGEHRA(1)TEA-NH2 (analogue of Compound 32)
Ac-EIhC(1)IWQDWGEHRA(1)TE-NH2 (analogue of Compound 33)
Ac-EIhC(1)IWQDWGEHRA(1)TEGE-NH2 (analogue of Compound 34)
Ac-EGEIhC(1)IWQDWGEHRA(1)EGE-NH2 (analogue of Compound 35)
Ac-ESEIhC(1)IWQDWGEHRA(1)EGE-NH2 (analogue of Compound 36)
Ac-KEKIhC(1)IWQDWGEHRA(1)TEKE-NH2 (analogue of Compound 37)
Ac-EKGIhC(1)IWQDWGEHRA(1)TEKP-NH2 (analogue of Compound 38)
Ac-IhC(1)IWQDWGEHRA(1)TEGK-NH2 (analogue of Compound 39)
Ac-GSAIhC(1)IWQDWGEHRA(1)[Sar]E-NH2 (analogue of Compound 40)
Ac-SAIhC(1)IWQDWGEHRA(1)[Sar]E-NH2 (analogue of Compound 41)
Ac-SAIhC(1)IWQDWGEHRA(1)TEG-NH2 (analogue of Compound 42)
Ac-FhC(1)IWQDWGEHRA(1)TGAE-NH2 (analogue of Compound 43)
Ac-EGSAIhC(1)IWQDWGEHRA(1)[Sar]EGE-NH2 (analogue of Compound 44)
Ac-EGSAFhC(1)IWQDWGEHRA(1)[Sar]E-NH2 (analogue of Compound 45)
Ac-ESSAIhC(1)IWQDWGAHRA(1)T-NH2 (analogue of Compound 46)
Ac-IhC(1)IWQDWGAHRA(1)TGAES-NH2 (analogue of Compound 47)
H-{d}YIhC(1)1[1-Me-Trp]QDW[Sar]AHRA(1)[N-Me-Ile]-NH2 (analogue of Compound 48)
Ac-EGSAIhC(1)l[1-Me-Trp]QDWGEHRA(1)[Sar]E-NH2 (analogue of Compound 49)
Ac-EGSAIhC(1)l[2-Nal]QDWGEHRA(1)[Sar]E-NH2 (analogue of Compound 50)
Ac-IhC(1)l[1-Me-Trp]QDWGEHRA(1)TGAES-NH2 (analogue of Compound 51)
Ac-IhC(1)l[2-Nal]QDWGEHRA(1)TGAES-NH2 (analogue of Compound 52)
Ac-EGSAFhC(1)1[1-Me-Trp]QDWGEHRA(1)[Sar]E-NH2 (analogue of Compound 53)
Ac-EGSAYhC(1)l[1-Me-Trp]QDWGEHRA(1)[Sar]E-NH2 (analogue of Compound 54)
Ac-EGSAIhC(1)IWQDWGEHRA(1)TE-NH2 (analogue of Compound 55)
Ac-EGSAFhC(1)l[1-Nal]QDWGEHRA(1)TE-NH2 (analogue of Compound 56)
Ac-EGSAFhC(1)1[1-Me-Trp]QDWGEHRA(1)TE-NH2 (analogue of Compound 57)
Ac-EGSAFhC(1)1[1-Me-Trp]QDWGEHRA(1)EGE-NH2 (analogue of Compound 58)
Ac-EGSAYhC(1)l[1-Me-Trp]QDWGEHRA(1)TE-NH2 (analogue of Compound 59)
Ac-EGSAFhC(1)1[2-Nal]QDWGEHRA(1)TE-NH2 (analogue of Compound 60)
Ac-FhC(1)1[1-Me-Trp]QDWGEHRA(1)TGAES-NH2 (analogue of Compound 61)
Ac-YhC(1)1[1-Me-Trp]QDWGEHRA(1)TGAES-NH2 (analogue of Compound 62)
Ac-FhC(1)l[1-Nal]QDWGEHRA(1)TGAES-NH2 (analogue of Compound 63)
Ac-FhC(1)l[2-Nal]QDWGEHRA(1)TGAES-NH2 (analogue of Compound 64)
Ac-YhC(1)l[2-Nal]QDWGEHRA(1)TGAES-NH2 (analogue of Compound 65)
Ac-YhC(1)IWQDWGEHRA(1)TGAES-NH2 (analogue of Compound 66)
Ac-SEFhC(1)1[1-Me-Trp]QDWGEHRA(1)TGAES-NH2 (analogue of Compound 67 and 151)
Ac-YhC(1)l[1-Me-Trp]QDWGEHRA(1)TEAGS-NH2 (analogue of Compound 68)
Ac-YhC(1)1[1-Me-Trp]QDWGEHRA(1)TESGA-NH2 (analogue of Compound 69)
Ac-EGSAYhC(1)I[1-Me-Trp]QEWGEHRA(1)[Sar]E-NH2 (analogue of Compound 70)
Ac-SEYhC(1)I[1-Me-Trp]QDWGEHRA(1)[Sar]EA-NH2 (analogue of Compound 71)
Ac-FhC(1)l[1-Me-Trp]QDW[Sar]EHRA(1)TGAES-NH2 (analogue of Compound 72)
H-{d}YFhC(1)l[1-Me-Trp]QDW[Sar]EHRA(1)TGAES-NH2 (analogue of Compound 73)
Ac-SEFhC(1)l[1-Me-Trp]QDWGEHRA(1)[Sar]GAES-NH2 (analogue of Compound 74)
Ac-SEFhC(1)l[1-Me-Trp]QDWGEHRA(1)[Sar]EA-NH2 (analogue of Compound 75)
Ac-SEFhC(1)l[1-Me-Trp]QDW[Sar]EHRA(1)[Sar]EA-NH2 (analogue of Compound 76)
Ac-SEFhC(1)l[1-Me-Trp]QDW[Sar]EHRA(1)TEA-NH2 (analogue of Compound 77)
Ac-SEFhC(1)l[1-Me-Trp]QDWGEHRA(1)[Sar]E-NH2 (analogue of Compound 78)
Ac-SEFhC(1)l[1-Me-Trp]QDW[Sar]EHRA(1)[Sar]E-NH2 (analogue of Compound 79)
Ac-EFhC(1)l[1-Me-Trp]QDWGEHRA(1)[Sar]EA-NH2 (analogue of Compound 80)
Ac-SE[Sar]hC(1)1[1-Me-Trp]QDWGEHRA(1)[Sar]EA-NH2 (analogue of Compound 81)
Ac-SE[Sar]hC(1)I[1-Me-Trp]QDWGEHRA(1)TEA-NH2 (analogue of Compound 82)
Ac-SEFhC(1)1[1-Me-Trp]QEWGEHRA(1)[Sar]EA-NH2 (analogue of Compound 83)
Ac-SEFhC(1)I[1-Me-Trp]QDWGEHRA(1)SEA-NH2 (analogue of Compound 84)
Ac-EFhC(1)1[1-Me-Trp]QDWGEHRA(1)ES-NH2 (analogue of Compound 85)
Ac-SEFhC(1)1[1-Me-Trp]QDWGEHKA(1)[Sar]EA-NH2 (analogue of Compound 86)
Ac-GEFhC(1)1[1-Me-Trp]QDWGEHRA(1)[Sar]EA-NH2 (analogue of Compound 87)
Ac-GE[Sar]hC(1)1[1-Me-Trp]QDWGEHRA(1)TEA-NH2 (analogue of Compound 88)
Ac-SE[Sar]hC(1)1[1-Me-Trp]QEW[Sar]EHRA(1)TEA-NH2 (analogue of Compound 89)
Ac-SE[Sar]hC(1)l[1-Me-Trp]QEWGEHRA(1)[Sar]EA-NH2 (analogue of Compound 90)
H-{d}Y[Sar]hC(1)1[1-Me-Trp]QDWGEHRA(1)TEA-NH2 (analogue of Compound 91)
wherein the side chains of residues designated hC(1) and A(1) form a cystathionine bridge.

28. A compstatin analogue according to claim 1, which is:
Ac-IA(1)IWQDWGAHRhC(1)T-NH2 (analogue of Compound 1)
Ac-IA(1)IWQDWGEHRhC(1)T-NH2 (analogue of Compound 2)
Ac-ESSAIA(1)IWQDWGEHRhC(1)T-NH2 (analogue of Compound 3)
Ac-IA(1)l[1-Me-Trp]QDWGEHRhC(1)T-NH2 (analogue of Compound 4)
Ac-IA(1)IWQDWGKHRhC(1)T-NH2 (analogue of Compound 5)
Ac-IA(1)IWQDWGSHRhC(1)T-NH2 (analogue of Compound 6)
Ac-IA(1)IWQKWGEHRhC(1)T-NH2 (analogue of Compound 7)
Ac-IA(1)IWQKWGAHRhC(1)TGAES-NH2 (analogue of Compound 8)
Ac-YA(1)IWQDWGEHRhC(1)T-NH2 (analogue of Compound 9)
Ac-ESSAYA(1)IWQDWGEHRhC(1)T-NH2 (analogue of Compound 10)
Ac-[Sar]A(1)IWQDWGEHRhC(1)T-NH2 (analogue of Compound 11)
Ac-IA(1)IWQDWGAHRhC(1)E-NH2 (analogue of Compound 12)
Ac-IA(1)IWQDWGEHRhC(1)[Sar]-NH2 (analogue of Compound 13)
Ac-ESSAIA(1)IWQDWGEHRhC(1)TGAES-NH2 (analogue of Compound 14)
Ac-IA(1)IWQDWGEHRhC(1)TGAES-NH2 (analogue of Compound 15)
Ac-IA(1)IWQEWGEHRhC(1)T-NH2 (analogue of Compound 16)
Ac-IA(1)IWQDWGDHRhC(1)T-NH2 (analogue of Compound 17)
Ac-IA(1)IWQDWGRHRhC(1)T-NH2 (analogue of Compound 18)
Ac-IA(1)IWQDWGAHShC(1)T-NH2 (analogue of Compound 19)
Ac-IA(1)IWQDWGEHShC(1)T-NH2 (analogue of Compound 20)
Ac-IA(1)IWQDWGEHRhC(1)S-NH2 (analogue of Compound 21)
Ac-IA(1)IWQDWGEHRhC(1)E-NH2 (analogue of Compound 22)
Ac-FA(1)IWQDWGEHRhC(1)T-NH2 (analogue of Compound 23)
Ac-IA(1)IWQDWGEHRhC(1)TEGE-NH2 (analogue of Compound 24)
Ac-IA(1)IWQDWGEHRhC(1)TEA-NH2 (analogue of Compound 25)
Ac-IA(1)IWQDWGEHRhC(1)TE-NH2 (analogue of Compound 26)
Ac-IA(1)IWQDWGEHRhC(1)EGE-NH2 (analogue of Compound 27)
Ac-EGSAIA(1)IWQDWGEHRhC(1)[Sar]E-NH2 (analogue of Compound 28)
Ac-EGSAIA(1)IWQDWGEHRhC(1)T-NH2 (analogue of Compound 29)
Ac-EGEIA(1)IWQDWGEHRhC(1)T-NH2 (analogue of Compound 30)
Ac-ESEIA(1)IWQDWGEHRhC(1)T-NH2 (analogue of Compound 31)
Ac-SEIA(1)IWQDWGEHRhC(1)TEA-NH2 (analogue of Compound 32)
Ac-EIA(1)IWQDWGEHRhC(1)TE-NH2 (analogue of Compound 33)
Ac-EIA(1)IWQDWGEHRhC(1)TEGE-NH2 (analogue of Compound 34)
Ac-EGEIA(1)IWQDWGEHRhC(1)EGE-NH2 (analogue of Compound 35)
Ac-ESEIA(1)IWQDWGEHRhC(1)EGE-NH2 (analogue of Compound 36)
Ac-KEKIA(1)IWQDWGEHRhC(1)TEKE-NH2 (analogue of Compound 37)
Ac-EKGIA(1)IWQDWGEHRhC(1)TEKP-NH2 (analogue of Compound 38)
Ac-IA(1)IWQDWGEHRhC(1)TEGK-NH2 (analogue of Compound 39)
Ac-GSAIA(1)IWQDWGEHRhC(1)[Sar]E-NH2 (analogue of Compound 40)
Ac-SAIA(1)IWQDWGEHRhC(1)[Sar]E-NH2 (analogue of Compound 41)
Ac-SAIA(1)IWQDWGEHRhC(1)TEG-NH2 (analogue of Compound 42)
Ac-FA(1)IWQDWGEHRhC(1)TGAE-NH2 (analogue of Compound 43)
Ac-EGSAIA(1)IWQDWGEHRhC(1)[Sar]EGE-NH2 (analogue of Compound 44)
Ac-EGSAFA(1)IWQDWGEHRhC(1)[Sar]E-NH2 (analogue of Compound 45)
Ac-ESSAIA(1)IWQDWGAHRhC(1)T-NH2 (analogue of Compound 46)
Ac-IA(1)IWQDWGAHRhC(1)TGAES-NH2 (analogue of Compound 47)
H-{d}YIA(1)1[1-Me-Trp]QDW[Sar]AHRhC(1)[N-Me-Ile]-NH2 (analogue of Compound 48)
Ac-EGSAIA(1)l[1-Me-Trp]QDWGEHRhC(1)[Sar]E-NH2 (analogue of Compound 49)
Ac-EGSAIA(1)l[2-Nal]QDWGEHRhC(1)[Sar]E-NH2 (analogue of Compound 50)
Ac-IA(1)1[1-Me-Trp]QDWGEHRhC(1)TGAES-NH2 (analogue of Compound 51)
Ac-IA(1)1[2-Nal]QDWGEHRhC(1)TGAES-NH2 (analogue of Compound 52)
Ac-EGSAFA(1)l[1-Me-Trp]QDWGEHRhC(1)[Sar]E-NH2 (analogue of Compound 53)
Ac-EGSAYA(1)1[1-Me-Trp]QDWGEHRhC(1)[Sar]E-NH2 (analogue of Compound 54)
Ac-EGSAIA(1)IWQDWGEHRhC(1)TE-NH2 (analogue of Compound 55)
Ac-EGSAFA(1)1[1-Nal]QDWGEHRhC(1)TE-NH2 (analogue of Compound 56)
Ac-EGSAFA(1)l[1-Me-Trp]QDWGEHRhC(1)TE-NH2 (analogue of Compound 57)
Ac-EGSAFA(1)1[1-Me-Trp]QDWGEHRhC(1)EGE-NH2 (analogue of Compound 58)
Ac-EGSAYA(1)l[1-Me-Trp]QDWGEHRhC(1)TE-NH2 (analogue of Compound 59)
Ac-EGSAFA(1)l[2-Nal]QDWGEHRhC(1)TE-NH2 (analogue of Compound 60)
Ac-FA(1)1[1-Me-Trp]QDWGEHRhC(1)TGAES-NH2 (analogue of Compound 61)
Ac-YA(1)1[1-Me-Trp]QDWGEHRhC(1)TGAES-NH2 (analogue of Compound 62)
Ac-FA(1)1[1-Nal]QDWGEHRhC(1)TGAES-NH2 (analogue of Compound 63)
Ac-FA(1)1[2-Nal]QDWGEHRhC(1)TGAES-NH2 (analogue of Compound 64)
Ac-YA(1)l[2-Nal]QDWGEHRhC(1)TGAES-NH2 (analogue of Compound 65)
Ac-YA(1)IWQDWGEHRhC(1)TGAES-NH2 (analogue of Compound 66)
Ac-SEFA(1)I[1-Me-Trp]QDWGEHRhC(1)TGAES-NH2 (Compound 151; analogue of Compound 67)
Ac-YA(1)l[1-Me-Trp]QDWGEHRhC(1)TEAGS-NH2 (analogue of Compound 68)
Ac-YA(1)l[1-Me-Trp]QDWGEHRhC(1)TESGA-NH2 (analogue of Compound 69)
Ac-EGSAYA(1)1[1-Me-Trp]QEWGEHRhC(1)[Sar]E-NH2 (analogue of Compound 70)
Ac-SEYA(1)l[1-Me-Trp]QDWGEHRhC(1)[Sar]EA-NH2 (analogue of Compound 71)
Ac-FA(1)1[1-Me-Trp]QDW[Sar]EHRhC(1)TGAES-NH2 (analogue of Compound 72)
H-{d}YFA(1)l[1-Me-Trp]QDW[Sar]EHRhC(1)TGAES-NH2 (analogue of Compound 73)
Ac-SEFA(1)1[1-Me-Trp]QDWGEHRhC(1)[Sar]GAES-NH2 (analogue of Compound 74)
Ac-SEFA(1)l[1-Me-Trp]QDWGEHRhC(1)[Sar]EA-NH2 (analogue of Compound 75)
Ac-SEFA(1)1[1-Me-Trp]QDW[Sar]EHRhC(1)[Sar]EA-NH2 (analogue of Compound 76)
Ac-SEFA(1)1[1-Me-Trp]QDW[Sar]EHRhC(1)TEA-NH2 (analogue of Compound 77)
Ac-SEFA(1)l[1-Me-Trp]QDWGEHRhC(1)[Sar]E-NH2 (analogue of Compound 78)
Ac-SEFA(1)1[1-Me-Trp]QDW[Sar]EHRhC(1)[Sar]E-NH2 (analogue of Compound 79)
Ac-EFA(1)1[1-Me-Trp]QDWGEHRhC(1)[Sar]EA-NH2 (analogue of Compound 80)
Ac-SE[Sar]A(1)1[1-Me-Trp]QDWGEHRhC(1)[Sar]EA-NH2 (analogue of Compound 81)
Ac-SE[Sar]A(1)1[1-Me-Trp]QDWGEHRhC(1)TEA-NH2 (analogue of Compound 82)
Ac-SEFA(1)l[1-Me-Trp]QEWGEHRhC(1)[Sar]EA-NH2 (analogue of Compound 83)
Ac-SEFA(1)l[1-Me-Trp]QDWGEHRhC(1)SEA-NH2 (analogue of Compound 84)
Ac-EFA(1)1[1-Me-Trp]QDWGEHRhC(1)ES-NH2 (analogue of Compound 85)
Ac-SEFA(1)l[1-Me-Trp]QDWGEHKhC(1)[Sar]EA-NH2 (analogue of Compound 86)
Ac-GEFA(1)l[1-Me-Trp]QDWGEHRhC(1)[Sar]EA-NH2 (analogue of Compound 87)
Ac-GE[Sar]A(1)1[1-Me-Trp]QDWGEHRhC(1)TEA-NH2 (analogue of Compound 88)
Ac-SE[Sar]A(1)1[1-Me-Trp]QEW[Sar]EHRhC(1)TEA-NH2 (analogue of Compound 89)
Ac-SE[Sar]A(1)l[1-Me-Trp]QEWGEHRhC(1)[Sar]EA-NH2 (analogue of Compound 90)
H-{d}Y[Sar]A(1)l[1-Me-Trp]QDWGEHRhC(1)TEA-NH2 (analogue of Compound 91)
wherein the side chains of residues designated A(1) and hC(1) form a cystathionine bridge.

29. A compstatin analogue according to claim 1, which is:
Ac-IC(1)IWQDWGAHRA(1)T-NH2 (analogue of Compound 1)
Ac-IC(1)IWQDWGEHRA(1)T-NH2 (analogue of Compound 2)
Ac-ESSAIC(1)IWQDWGEHRA(1)T-NH2 (analogue of Compound 3)
Ac-IC(1)1[1-Me-Trp]QDWGEHRA(1)T-NH2 (analogue of Compound 4)
Ac-IC(1)IWQDWGKHRA(1)T-NH2 (analogue of Compound 5)
Ac-IC(1)IWQDWGSHRA(1)T-NH2 (analogue of Compound 6)
Ac-IC(1)IWQKWGEHRA(1)T-NH2 (analogue of Compound 7)
Ac-IC(1)IWQKWGAHRA(1)TGAES-NH2 (analogue of Compound 8)
Ac-YC(1)IWQDWGEHRA(1)T-NH2 (analogue of Compound 9)
Ac-ESSAYC(1)IWQDWGEHRA(1)T-NH2 (analogue of Compound 10)
Ac-[Sar]C(1)IWQDWGEHRA(1)T-NH2 (analogue of Compound 11)
Ac-IC(1)IWQDWGAHRA(1)E-NH2 (analogue of Compound 12)
Ac-IC(1)IWQDWGEHRA(1)[Sar]-NH2 (analogue of Compound 13)
Ac-ESSAIC(1)IWQDWGEHRA(1)TGAES-NH2 (analogue of Compound 14)
Ac-IC(1)IWQDWGEHRA(1)TGAES-NH2 (analogue of Compound 15)
Ac-IC(1)IWQEWGEHRA(1)T-NH2 (analogue of Compound 16)
Ac-IC(1)IWQDWGDHRA(1)T-NH2 (analogue of Compound 17)
Ac-IC(1)IWQDWGRHRA(1)T-NH2 (analogue of Compound 18)
Ac-IC(1)IWQDWGAHSA(1)T-NH2 (analogue of Compound 19)
Ac-IC(1)IWQDWGEHSA(1)T-NH2 (analogue of Compound 20)
Ac-IC(1)IWQDWGEHRA(1)S-NH2 (analogue of Compound 21)
Ac-IC(1)IWQDWGEHRA(1)E-NH2 (analogue of Compound 22)
Ac-FC(1)IWQDWGEHRA(1)T-NH2 (analogue of Compound 23)
Ac-IC(1)IWQDWGEHRA(1)TEGE-NH2 (analogue of Compound 24)
Ac-IC(1)IWQDWGEHRA(1)TEA-NH2 (analogue of Compound 25)
Ac-IC(1)IWQDWGEHRA(1)TE-NH2 (analogue of Compound 26)
Ac-IC(1)IWQDWGEHRA(1)EGE-NH2 (analogue of Compound 27)
Ac-EGSAIC(1)IWQDWGEHRA(1)[Sar]E-NH2 (analogue of Compound 28)
Ac-EGSAIC(1)IWQDWGEHRA(1)T-NH2 (analogue of Compound 29)
Ac-EGEIC(1)IWQDWGEHRA(1)T-NH2 (analogue of Compound 30)
Ac-ESEIC(1)IWQDWGEHRA(1)T-NH2 (analogue of Compound 31)
Ac-SEIC(1)IWQDWGEHRA(1)TEA-NH2 (analogue of Compound 32)
Ac-EIC(1)IWQDWGEHRA(1)TE-NH2 (analogue of Compound 33)
Ac-EIC(1)IWQDWGEHRA(1)TEGE-NH2 (analogue of Compound 34)
Ac-EGEIC(1)IWQDWGEHRA(1)EGE-NH2 (analogue of Compound 35)
Ac-ESEIC(1)IWQDWGEHRA(1)EGE-NH2 (analogue of Compound 36)
Ac-KEKIC(1)IWQDWGEHRA(1)TEKE-NH2 (analogue of Compound 37)
Ac-EKGIC(1)IWQDWGEHRA(1)TEKP-NH2 (analogue of Compound 38)
Ac-IC(1)IWQDWGEHRA(1)TEGK-NH2 (analogue of Compound 39)
Ac-GSAIC(1)IWQDWGEHRA(1)[Sar]E-NH2 (analogue of Compound 40)
Ac-SAIC(1)IWQDWGEHRA(1)[Sar]E-NH2 (analogue of Compound 41)
Ac-SAIC(1)IWQDWGEHRA(1)TEG-NH2 (analogue of Compound 42)
Ac-FC(1)IWQDWGEHRA(1)TGAE-NH2 (analogue of Compound 43)
Ac-EGSAIC(1)IWQDWGEHRA(1)[Sar]EGE-NH2 (analogue of Compound 44)
Ac-EGSAFC(1)IWQDWGEHRA(1)[Sar]E-NH2 (analogue of Compound 45)
Ac-ESSAIC(1)IWQDWGAHRA(1)T-NH2 (analogue of Compound 46)
Ac-IC(1)IWQDWGAHRA(1)TGAES-NH2 (analogue of Compound 47)
H-{d}YIC(1)1[1-Me-Trp]QDW[Sar]AHRA(1)[N-Me-Ile]-NH2 (analogue of Compound 48)
Ac-EGSAIC(1)l[1-Me-Trp]QDWGEHRA(1)[Sar]E-NH2 (analogue of Compound 49)
Ac-EGSAIC(1)l[2-Nal]QDWGEHRA(1)[Sar]E-NH2 (analogue of Compound 50)
Ac-IC(1)l[1-Me-Trp]QDWGEHRA(1)TGAES-NH2 (analogue of Compound 51)
Ac-IC(1)l[2-Nal]QDWGEHRA(1)TGAES-NH2 (analogue of Compound 52)
Ac-EGSAFC(1)I[1-Me-Trp]QDWGEHRA(1)[Sar]E-NH2 (analogue of Compound 53)
Ac-EGSAYC(1)l[1-Me-Trp]QDWGEHRA(1)[Sar]E-NH2 (analogue of Compound 54)
Ac-EGSAIC(1)IWQDWGEHRA(1)TE-NH2 (analogue of Compound 55)
Ac-EGSAFC(1)1[1-Nal]QDWGEHRA(1)TE-NH2 (analogue of Compound 56)
Ac-EGSAFC(1)1[1-Me-Trp]QDWGEHRA(1)TE-NH2 (analogue of Compound 57)
Ac-EGSAFC(1)1[1-Me-Trp]QDWGEHRA(1)EGE-NH2 (analogue of Compound 58)
Ac-EGSAYC(1)1[1-Me-Trp]QDWGEHRA(1)TE-NH2 (analogue of Compound 59)
Ac-EGSAFC(1)1[2-Nal]QDWGEHRA(1)TE-NH2 (analogue of Compound 60)
Ac-FC(1)1[1-Me-Trp]QDWGEHRA(1)TGAES-NH2 (analogue of Compound 61)
Ac-YC(1)1[1-Me-Trp]QDWGEHRA(1)TGAES-NH2 (analogue of Compound 62)
Ac-FC(1)l[1-Nal]QDWGEHRA(1)TGAES-NH2 (analogue of Compound 63)
Ac-FC(1)1[2-Nal]QDWGEHRA(1)TGAES-NH2 (analogue of Compound 64)
Ac-YC(1)l[2-Nal]QDWGEHRA(1)TGAES-NH2 (analogue of Compound 65)
Ac-YC(1)IWQDWGEHRA(1)TGAES-NH2 (analogue of Compound 66)
Ac-SEFC(1)l[1-Me-Trp]QDWGEHRA(1)TGAES-NH2 (analogue of Compound 67 and 151)
Ac-YC(1)1[1-Me-Trp]QDWGEHRA(1)TEAGS-NH2 (analogue of Compound 68)
Ac-YC(1)1[1-Me-Trp]QDWGEHRA(1)TESGA-NH2 (analogue of Compound 69)
Ac-EGSAYC(1)I[1-Me-Trp]QEWGEHRA(1)[Sar]E-NH2 (analogue of Compound 70)
Ac-SEYC(1)l[1-Me-Trp]QDWGEHRA(1)[Sar]EA-NH2 (analogue of Compound 71)
Ac-FC(1)I[1-Me-Trp]QDW[Sar]EHRA(1)TGAES-NH2 (analogue of Compound 72)
H-{d}YFC(1)I[1-Me-Trp]QDW[Sar]EHRA(1)TGAES-NH2 (analogue of Compound 73)
Ac-SEFC(1)1[1-Me-Trp]QDWGEHRA(1)[Sar]GAES-NH2 (analogue of Compound 74)
Ac-SEFC(1)l[1-Me-Trp]QDWGEHRA(1)[Sar]EA-NH2 (analogue of Compound 75)
Ac-SEFC(1)l[1-Me-Trp]QDW[Sar]EHRA(1)[Sar]EA-NH2 (analogue of Compound 76)
Ac-SEFC(1)l[1-Me-Trp]QDW[Sar]EHRA(1)TEA-NH2 (analogue of Compound 77)
Ac-SEFC(1)1[1-Me-Trp]QDWGEHRA(1)[Sar]E-NH2 (analogue of Compound 78)
Ac-SEFC(1)1[1-Me-Trp]QDW[Sar]EHRA(1)[Sar]E-NH2 (analogue of Compound 79)
Ac-EFC(1)1[1-Me-Trp]QDWGEHRA(1)[Sar]EA-NH2 (analogue of Compound 80)
Ac-SE[Sar]C(1)I[1-Me-Trp]QDWGEHRA(1)[Sar]EA-NH2 (analogue of Compound 81)
Ac-SE[Sar]C(1)1[1-Me-Trp]QDWGEHRA(1)TEA-NH2 (analogue of Compound 82)
Ac-SEFC(1)I[1-Me-Trp]QEWGEHRA(1)[Sar]EA-NH2 (analogue of Compound 83)
Ac-SEFC(1)I[1-Me-Trp]QDWGEHRA(1)SEA-NH2 (analogue of Compound 84)
Ac-EFC(1)1[1-Me-Trp]QDWGEHRA(1)ES-NH2 (analogue of Compound 85)
Ac-SEFC(1)I[1-Me-Trp]QDWGEHKA(1)[Sar]EA-NH2 (analogue of Compound 86)
Ac-GEFC(1)I[1-Me-Trp]QDWGEHRA(1)[Sar]EA-NH2 (analogue of Compound 87)
Ac-GE[Sar]C(1)l[1-Me-Trp]QDWGEHRA(1)TEA-NH2 (analogue of Compound 88)
Ac-SE[Sar]C(1)1[1-Me-Trp]QEW[Sar]EHRA(1)TEA-NH2 (analogue of Compound 89)
Ac-SE[Sar]C(1)1[1-Me-Trp]QEWGEHRA(1)[Sar]EA-NH2 (analogue of Compound 90)
H-{d}Y[Sar]C(1)l[1-Me-Trp]QDWGEHRA(1)TEA-NH2 (analogue of Compound 91)
wherein the side chains of residues designated C(1) and A(1) form a lanthionine bridge.

30. A compstatin analogue according to claim 1 comprising a sequence selected from:
[K*]GSAIhC(1)IWQDWGEHRA(1)TEGE (analogue of Compound 100)
ASGEYhC(1)1[1-Me-Trp]QDWGEHRA(1)[Sar]EGE-[K*] (analogue of Compound 113)
EFhC(1)1[1-Me-Trp]QDWGEHRA(1)EGE-[K*] (analogue of Compound 134, 161)
EGSAIhC(1)IWQDWGEHRA(1)TEG[K*] (analogue of Compound 101)
EGSAYhC(1)l[1-Me-Trp]QDWGEH[K*]A(1)[Sar]E (analogue of Compound 103)
EGSAYhC(1)1[1-Me-Trp]QDWGEHRA(1)[Sar]EG-[K*] (analogue of Compound 104)
EGSAYhC(1)I[1-Me-Trp]QDWGEHRA(1)[Sar]EGE-[K*] (analogue of Compound 109)
EGSAYhC(1)I[1-Me-Trp]QDWGEHRA(1)[Sar]EGK-[K*] (analogue of Compound 110)
EGSAYhC(1)I[1-Me-Trp]QDWGEHRA(1)[Sar]EK[γGlu]-[K*] (analogue of Compound 111, 159)
FhC(1)I[1-Me-Trp]QDWGEHRA(1)TGAES-[K*] (analogue of Compound 102)
IhC(1)IWQDWGEHRA(1)TEG-[K*] (analogue of Compound 92)
IhC(1)IWQDWGEHRA(1)TEGE-[K*] (analogue of Compound 94)
SAYhC(1)1[1-Me-Trp]QDWGEHRA(1)[Sar]E-[K*] (analogue of Compound 105)
SEFhC(1)1[1-Me-Trp]QDWGEHRA(1)[Sar]EGA-[K*] (analogue of Compound 119, 154)
SEFhC(1)I[1-Me-Trp]QDWGEHRA(1)[Sar]EGE[Peg3][Peg3]-[K*] (Compound 152; analogue of Compound 123 and 146)
SEFhC(1)1[1-Me-Trp]QDWGEHRA(1)[Sar]EGEGGG-[K*] (analogue of Compound 129)
SEFhC(1)l[1-Me-Trp]QDWGEHRA(1)[Sar]EGE[Peg3]-[K*] (analogue of Compound 138)
SEFhC(1)1[1-Me-Trp]QDWGEHRA(1)[Sar]EGE[Peg3]ES-[K*] (analogue of Compound 140)
SEFhC(1)l[1-Me-Trp]QDWGEHRA(1)[Sar]EGE[Peg3][Peg3]-[K*] (analogue of Compound 127, 160)
SEFhC(1)1[1-Me-Trp]QDWGEHRA(1)[Sar]EGESES-[K*] (analogue of Compound 139)
SEFhC(1)l[1-Me-Trp]QDWGEHRA(1)[Sar]EK[γGlu]GGG-[K*] (analogue of Compound 132)
SEFhC(1)l[1-Me-Trp]QDWGEHRA(1)TEGE[8-aminooctanoyl]-[K*] (analogue of Compound 136)
SEFhC(1)1[1-Me-Trp]QDWGEHRA(1)TEGE[8-aminooctanoyl]E-[K*] (analogue of Compound 137)
SEFhC(1)l[1-Me-Trp]QDWGEHRA(1)TEGEGGG-[K*] (analogue of Compound 130)
SEFhC(1)l[1-Me-Trp]QDWGEHRA(1)TEGE[Peg3]ES-[K*] (Compound 165; analogue of Compound 142, 148, 163)
SEFhC(1)l[1-Me-Trp]QDWGEHRA(1)TEGE[Peg3][Peg3]-[K*] (analogue of Compound 126, 156)
SEFhC(1)l[1-Me-Trp]QDWGEHRA(1)TEK[γGlu]GGG-[K*] (analogue of Compound 133)
SEFhC(1)1[1-Me-Trp]QDWGEHRA(1)TGAES-[K*] (analogue of Compound 135)
SEFhC(1)1[1-Me-Trp]QEWGEHRA(1)[Sar]EGA-[K*] (analogue of Compound 120)
SEFhC(1)1[1-Me-Trp]QEWGEHRA(1)[Sar]EGE[Peg3][Peg3]-[K*] (Compound 167; analogue of Compound 124, 153)
SEYhC(1)l[1-Me-Trp]QDWGEHRA(1)[Sar]EGA-[K*] (analogue of Compound 112)
SEYhC(1)1[1-Me-Trp]QDWGEHRA(1)[Sar]EGE[Peg3][Peg3]-[K*] (analogue of Compound 117)
SEYhC(1)1[1-Me-Trp]QDWGEHRA(1)[Sar]EGE-[K*] (analogue of Compound 114)
SEYhC(1)I[1-Me-Trp]QEW[Sar]EHRA(1)[Sar]EK[γGlu]A-[K*] (analogue of Compound 121)
SEYhC(1)l[1-Me-Trp]QEWGEHRA(1)[Sar]EGA-[K*] (analogue of Compound 122)
SEYhC(1)1[1-Me-Trp]QEWGEHRA(1)[Sar]EGE[Peg3][Peg3]-[K*] (analogue of Compound 125)
EGSEYhC(1)l[1-Me-Trp]QDWGEHRA(1)[Sar]E (analogue of Compound 107)
ESSAIhC(1)IWQDWGEHRA(1)TEGE (analogue of Compound 99) SEFhC(1)1[1-Me-Trp]QDWGEHRA(1)[Sar]EGE[Peg3][Peg3][Peg3]-[K*] (analogue of Compound 143)
SEFhC(1)I[1-Me-Trp]QDW[Sar]EHRA(1)[Sar]E[Peg3][Peg3]-[K*] (Compound 164; analogue of Compound 144,147,162)
EFhC(1)l[1-Me-Trp]QDWGEHRA(1)[Sar]EA[Peg3][Peg3]-[K*] (analogue of Compound 145)
GEFhC(1)1[1-Me-Trp]QDW[Sar]EHRA(1)[Sar]EAE[Peg3][Peg3]-[K*] (analogue of Compound 149)
SEFhC(1)l[1-Me-Trp]QDW[Sar]EHRA(1)[Sar]EGE[Peg3]ES-[K*] (Compound 166; analogue of Compound 150)
GEFhC(1)l[1-Me-Trp]QEWGEHRA(1)[Sar]EGE[Peg3]ES-[K*] (analogue of Compound 155)
EFhC(1)l[1-Me-Trp]QEWGEHRA(1)[Sar]EA[Peg3][Peg3]-[K*] (analogue of Compound 158)
wherein the side chains of residues designated hC(1) and A(1) form a cystathionine bridge.

31. A compstatin analogue according to claim 1, comprising a sequence selected from:
[K*]GSAIA(1)IWQDWGEHRhC(1)TEGE (analogue of Compound 100)
ASGEYA(1)l[1-Me-Trp]QDWGEHRhC(1)[Sar]EGE-[K*] (analogue of Compound 113)
EFA(1)1[1-Me-Trp]QDWGEHRhC(1)EGE-[K*] (Compound 161; analogue of Compound 134)
EGSAIA(1)IWQDWGEHRhC(1)TEG[K*] (analogue of Compound 101)
EGSAYA(1)1[1-Me-Trp]QDWGEH[K*]hC(1)[Sar]E (analogue of Compound 103)
EGSAYA(1)l[1-Me-Trp]QDWGEHRhC(1)[Sar]EG-[K*] (analogue of Compound 104)
EGSAYA(1)1[1-Me-Trp]QDWGEHRhC(1)[Sar]EGE-[K*] (analogue of Compound 109)
EGSAYA(1)l[1-Me-Trp]QDWGEHRhC(1)[Sar]EGK-[K*] (analogue of Compound 110)
EGSAYA(1)1[1-Me-Trp]QDWGEHRhC(1)[Sar]EK[γGlu]-[K*] (Compound 159; analogue of Compound 111)
FA(1)1[1-Me-Trp]QDWGEHRhC(1)TGAES-[K*] (analogue of Compound 102)
IA(1)IWQDWGEHRhC(1)TEG-[K*] (analogue of Compound 92)
IA(1)IWQDWGEHRhC(1)TEGE-[K*] (analogue of Compound 94)
SAYA(1)l[1-Me-Trp]QDWGEHRhC(1)[Sar]E-[K*] (analogue of Compound 105)
SEFA(1)1[1-Me-Trp]QDWGEHRhC(1)[Sar]EGA-[K*] (Compound 154; analogue of Compound 119)
SEFA(1)1[1-Me-Trp]QDWGEHRhC(1)[Sar]EGE[Peg3][Peg3]-[K*] (Compound 146; analogue of Compound 123, 152)
SEFA(1)1[1-Me-Trp]QDWGEHRhC(1)[Sar]EGEGGG-[K*] (analogue of Compound 129)
SEFA(1)1[1-Me-Trp]QDWGEHRhC(1)[Sar]EGE[Peg3]-[K*] (analogue of Compound 138)
SEFA(1)l[1-Me-Trp]QDWGEHRhC(1)[Sar]EGE[Peg3]ES-[K*] (analogue of Compound 140)
SEFA(1)l[1-Me-Trp]QDWGEHRhC(1)[Sar]EGE[Peg3][Peg3]-[K*] (Compound 160; analogue of Compound 127)
SEFA(1)1[1-Me-Trp]QDWGEHRhC(1)[Sar]EGESES-[K*] (analogue of Compound 139)
SEFA(1)1[1-Me-Trp]QDWGEHRhC(1)[Sar]EK[γGlu]GGG-[K*] (analogue of Compound 132)
SEFA(1)1[1-Me-Trp]QDWGEHRhC(1)TEGE[8-aminooctanoyl]-[K*] (analogue of Compound 136)
SEFA(1)1[1-Me-Trp]QDWGEHRhC(1)TEGE[8-aminooctanoyl]E-[K*] (analogue of Compound 137)
SEFA(1)1[1-Me-Trp]QDWGEHRhC(1)TEGEGGG-[K*] (Compound 157; analogue of Compound 130)
SEFA(1)l[1-Me-Trp]QDWGEHRhC(1)TEGE[Peg3]ES-[K*] (Compound 148, 163; analogue of Compound 142, 165)
SEFA(1)l[1-Me-Trp]QDWGEHRhC(1)TEGE[Peg3][Peg3]-[K*] (Compound 156; analogue of Compound 126)
SEFA(1)l[1-Me-Trp]QDWGEHRhC(1)TEK[γGlu]GGG-[K*] (analogue of Compound 133)
SEFA(1)l[1-Me-Trp]QDWGEHRhC(1)TGAES-[K*] (analogue of Compound 135)
SEFA(1)l[1-Me-Trp]QEWGEHRhC(1)[Sar]EGA-[K*] (analogue of Compound 120)
SEFA(1)l[1-Me-Trp]QEWGEHRhC(1)[Sar]EGE[Peg3][Peg3]-[K*] (Compound 153; analogue of Compound 124, 167)
SEYA(1)1[1-Me-Trp]QDWGEHRhC(1)[Sar]EGA-[K*] (analogue of Compound 112)
SEYA(1)l[1-Me-Trp]QDWGEHRhC(1)[Sar]EGE[Peg3][Peg3]-[K*] (analogue of Compound 117)
SEYA(1)1[1-Me-Trp]QDWGEHRhC(1)[Sar]EGE-[K*] (analogue of Compound 114)
SEYA(1)1[1-Me-Trp]QEW[Sar]EHRhC(1)[Sar]EK[γGlu]A-[K*] (analogue of Compound 121)
SEYA(1)1[1-Me-Trp]QEWGEHRhC(1)[Sar]EGA-[K*] (analogue of Compound 122)
SEYA(1)1[1-Me-Trp]QEWGEHRhC(1)[Sar]EGE[Peg3][Peg3]-[K*] (analogue of Compound 125)
EGSEYA(1)I[1-Me-Trp]QDWGEHRhC(1)[Sar]E (analogue of Compound 107)
ESSAIA(1)IWQDWGEHRhC(1)TEGE (analogue of Compound 99)
SEFA(1)l[1-Me-Trp]QDWGEHRhC(1)[Sar]EGE[Peg3][Peg3][Peg3]-[K*] (analogue of Compound 143)
SEFA(1)I[1-Me-Trp]QDW[Sar]EHRhC(1)[Sar]E[Peg3][Peg3]-[K*] (Compound 147,162; analogue of Compound 144, 164)
EFA(1)1[1-Me-Trp]QDWGEHRhC(1)[Sar]EA[Peg3][Peg3]-[K*] (analogue of Compound 145)
GEFA(1)I[1-Me-Trp]QDW[Sar]EHRhC(1)[Sar]EAE[Peg3][Peg3]-[K*] (Compound 149)
SEFA(1)l[1-Me-Trp]QDW[Sar]EHRhC(1)[Sar]EGE[Peg3]ES-[K*] (Compound 150; analogue of Compound 166)
GEFA(1)1[1-Me-Trp]QEWGEHRhC(1)[Sar]EGE[Peg3]ES-[K*] (Compound 155)
EFA(1)l[1-Me-Trp]QEWGEHRhC(1)[Sar]EA[Peg3][Peg3]-[K*] (Compound 158)
wherein the side chains of residues designated A(1) and hC(1) form a cystathionine bridge.

32. A compstatin analogue according to claim 1, comprising a sequence selected from:
[K*]GSAIC(1)IWQDWGEHRA(1)TEGE (analogue of Compound 100)
ASGEYC(1)1[1-Me-Trp]QDWGEHRA(1)[Sar]EGE-[K*] (analogue of Compound 113)
EFC(1)1[1-Me-Trp]QDWGEHRA(1)EGE-[K*] (analogue of Compound 134, 161)
EGSAIC(1)IWQDWGEHRA(1)TEG[K*] (analogue of Compound 101)
EGSAYC(1)1[1-Me-Trp]QDWGEH[K*]A(1)[Sar]E (analogue of Compound 103)
EGSAYC(1)1[1-Me-Trp]QDWGEHRA(1)[Sar]EG-[K*] (analogue of Compound 104)
EGSAYC(1)1[1-Me-Trp]QDWGEHRA(1)[Sar]EGE-[K*] (analogue of Compound 109)
EGSAYC(1)I[1-Me-Trp]QDWGEHRA(1)[Sar]EGK-[K*] (analogue of Compound 110)
EGSAYC(1)1[1-Me-Trp]QDWGEHRA(1)[Sar]EK[γGlu]-[K*] (analogue of Compound 111, 159)
FC(1)l[1-Me-Trp]QDWGEHRA(1)TGAES-[K*] (analogue of Compound 102)
IC(1)IWQDWGEHRA(1)TEG-[K*] (analogue of Compound 92)
IC(1)IWQDWGEHRA(1)TEGE-[K*] (analogue of Compound 94)
SAYC(1)l[1-Me-Trp]QDWGEHRA(1)[Sar]E-[K*] (analogue of Compound 105)
SEFC(1)1[1-Me-Trp]QDWGEHRA(1)[Sar]EGA-[K*] (analogue of Compound 119)
SEFC(1)I[1-Me-Trp]QDWGEHRA(1)[Sar]EGE[Peg3][Peg3]-[K*] (analogue of Compound 123,146and 152)
SEFC(1)1[1-Me-Trp]QDWGEHRA(1)[Sar]EGEGGG-[K*] (analogue of Compound 129)
SEFC(1)1[1-Me-Trp]QDWGEHRA(1)[Sar]EGE[Peg3]-[K*] (analogue of Compound 138)
SEFC(1)l[1-Me-Trp]QDWGEHRA(1)[Sar]EGE[Peg3]ES-[K*] (analogue of Compound 140)
SEFC(1)l[1-Me-Trp]QDWGEHRA(1)[Sar]EGE[Peg3][Peg3]-[K*] (analogue of Compound 127, 160)
SEFC(1)1[1-Me-Trp]QDWGEHRA(1)[Sar]EGESES-[K*] (analogue of Compound 139)
SEFC(1)1[1-Me-Trp]QDWGEHRA(1)[Sar]EK[γGlu]GGG-[K*] (analogue of Compound 132)
SEFC(1)l[1-Me-Trp]QDWGEHRA(1)TEGE[8-aminooctanoyl]-[K*] (analogue of Compound 136)
SEFC(1)I[1-Me-Trp]QDWGEHRA(1)TEGE[8-aminooctanoyl]E-[K*] (analogue of Compound 137)
SEFC(1)I[1-Me-Trp]QDWGEHRA(1)TEGEGGG-[K*] (analogue of Compound 130, 157)
SEFC(1)I[1-Me-Trp]QDWGEHRA(1)TEGE[Peg3]ES-[K*] (analogue of Compound 142, 148, 163, 165)
SEFC(1)I[1-Me-Trp]QDWGEHRA(1)TEGE[Peg3][Peg3]-[K*] (analogue of Compound 126, 156)
SEFC(1)I[1-Me-Trp]QDWGEHRA(1)TEK[γGlu]GGG-[K*] (analogue of Compound 133)
SEFC(1)1[1-Me-Trp]QDWGEHRA(1)TGAES-[K*] (analogue of Compound 135)
SEFC(1)I[1-Me-Trp]QEWGEHRA(1)[Sar]EGA-[K*] (analogue of Compound 120)
SEFC(1)1[1-Me-Trp]QEWGEHRA(1)[Sar]EGE[Peg3][Peg 3]-[K*] (analogue of Compound 124, 153, 167)
SEYC(1)I[1-Me-Trp]QDWGEHRA(1)[Sar]EGA-[K*] (analogue of Compound 112)
SEYC(1)I[1-Me-Trp]QDWGEHRA(1)[Sar]EGE[Peg3][Peg3]-[K*] (analogue of Compound 117)
SEYC(1)I[1-Me-Trp]QDWGEHRA(1)[Sar]EGE-[K*] (analogue of Compound 114)
SEYC(1)1[1-Me-Trp]QEW[Sar]EHRA(1)[Sar]EK[γGlu]A-[K*] (analogue of Compound 121)
SEYC(1)I[1-Me-Trp]QEWGEHRA(1)[Sar]EGA-[K*] (analogue of Compound 122)
SEYC(1)I[1-Me-Trp]QEWGEHRA(1)[Sar]EGE[Peg3][Peg3]-[K*] (analogue of Compound 125)
EGSEYC(1)I[1-Me-Trp]QDWGEHRA(1)[Sar]E (analogue of Compound 107)
ESSAIC(1)IWQDWGEHRA(1)TEGE (analogue of Compound 99)
SEFC(1)I[1-Me-Trp]QDWGEHRA(1)[Sar]EGE[Peg3][Peg3][Peg3]-[K*] (analogue of Compound 143)
SEFC(1)1[1-Me-Trp]QDW[Sar]EHRA(1)[Sar]E[Peg3][Peg3]-[K*] (analogue of Compound 144, 147, 162, 164)
EFC(1)I[1-Me-Trp]QDWGEHRA(1)[Sar]EA[Peg3][Peg3]-[K*] (analogue of Compound 145)
GEFC(1)l[1-Me-Trp]QDW[Sar]EHRA(1)[Sar]EAE[Peg3][Peg3]-[K*] (analogue of Compound 149)
Ac-SEFC(1)l[1-Me-Trp]QDW[Sar]EHRA(1)[Sar]EGE[Peg3]ES-[K*] (analogue of Compound 150, 166)
GEFC(1)I[1-Me-Trp]QEWGEHRA(1)[Sar]EGE[Peg3]ES-[K*] (analogue of Compound 155)
EFC(1)1[1-Me-Trp]QEWGEHRA(1)[Sar]EA[Peg3][Peg3]-[K*] (analogue of Compound 158)
wherein the side chains of residues designated C(1) and A(1) form a lanthionine bridge.

33. A compstatin analogue according to claim 30 comprising a sequence selected from:
Ac-[K*]GSAIhC(1)IWQDWGEHRA(1)TEGE-NH2 (analogue of Compound 100)
Ac-ASGEYhC(1)l[1-Me-Trp]QDWGEHRA(1)[Sar]EGE-[K*]-NH2 (analogue of Compound 113)
Ac-EFhC(1)1[1-Me-Trp]QDWGEHRA(1)EGE-[K*]-NH2 (analogue of Compound 134, 161)
Ac-EGSAIhC(1)IWQDWGEHRA(1)TEG-[K*]-NH2 (analogue of Compound 101)
Ac-EGSAYhC(1)l[1-Me-Trp]QDWGEH[K*]A(1)[Sar]E-NH2 (analogue of Compound 103)
Ac-EGSAYhC(1)1[1-Me-Trp]QDWGEHRA(1)[Sar]EG-[K*]-NH2 (analogue of Compound 104)
Ac-EGSAYhC(1)1[1-Me-Trp]QDWGEHRA(1)[Sar]EGE-[K*]-NH2 (analogue of Compound 109)
Ac-EGSAYhC(1)I[1-Me-Trp]QDWGEHRA(1)[Sar]EGK-[K*]-NH2 (analogue of Compound 110)
Ac-EGSAYhC(1)1[1-Me-Trp]QDWGEHRA(1)[Sar]EK[γGlu]-[K*]-NH2 (analogue of Compound 111, 159)
Ac-FhC(1)l[1-Me-Trp]QDWGEHRA(1)TGAES-[K*]-NH2 (analogue of Compound 102)
Ac-IhC(1)lWQDWGEHRA(1)TEG-[K*]-NH2 (analogue of Compound 92, 93, 95, 96, 98)
Ac-IhC(1)IWQDWGEHRA(1)TEGE-[K*]-NH2 (analogue of Compound 94, 97)
Ac-SAYhC(1)1[1-Me-Trp]QDWGEHRA(1)[Sar]E-[K*]-NH2 (analogue of Compound 105, 106)
Ac-SEFhC(1)1[1-Me-Trp]QDWGEHRA(1)[Sar]EGA-[K*]-NH2 (analogue of Compound 119, 154)
Ac-SEFhC(1)I[1-Me-Trp]QDWGEHRA(1)[Sar]EGE[Peg3][Peg3]-[K*]-NH2 (Compound 152, analogue of Compound 123 and 146)
Ac-SEFhC(1)1[1-Me-Trp]QDWGEHRA(1)[Sar]EGEGGG-[K*]-NH2 (analogue of Compound 129)
Ac-SEFhC(1)1[1-Me-Trp]QDWGEHRA(1)[Sar]EGE[Peg3]-[K*]-NH2 (analogue of Compound 138)
Ac-SEFhC(1)1[1-Me-Trp]QDWGEHRA(1)[Sar]EGE[Peg3]ES-[K*]-NH2 (analogue of Compound 140)
Ac-SEFhC(1)I[1-Me-Trp]QDWGEHRA(1)[Sar]EGE[Peg3][Peg3]-[K*]-NH2 (analogue of Compound 127, 128, 160)
Ac-SEFhC(1)l[1-Me-Trp]QDWGEHRA(1)[Sar]EGESES-[K*]-NH2 (analogue of Compound 139, 141)
Ac-SEFhC(1)l[1-Me-Trp]QDWGEHRA(1)[Sar]EK[γGlu]GGG-[K*]-NH2 (analogue of Compound 132)
Ac-SEFhC(1)l[1-Me-Trp]QDWGEHRA(1)TEGE[8-aminooctanoyl]-[K*]-NH2 (analogue of Compound 136)
Ac-SEFhC(1)1[1-Me-Trp]QDWGEHRA(1)TEGE[8-aminooctanoyl]E-[K*]-NH2 (analogue of Compound 137)
Ac-SEFhC(1)I[1-Me-Trp]QDWGEHRA(1)TEGEGGG-[K*]-NH2 (analogue of Compound 130, 131, 157)
Ac-SEFhC(1)1[1-Me-Trp]QDWGEHRA(1)TEGE-[Peg3]ES-[K*]-NH2 (Compound 165; analogue of Compound 142 and 148)
Ac-SEFhC(1)l[1-Me-Trp]QDWGEHRA(1)TEGE-[Peg3]ES-[K*]-OH (analogue of Compound 163)
Ac-SEFhC(1)1[1-Me-Trp]QDWGEHRA(1)TEGE-[Peg3][Peg3]-[K*]-NH2 (analogue of Compound 126, 156)
Ac-SEFhC(1)I[1-Me-Trp]QDWGEHRA(1)TEK[γGlu]GGG-[K*]-NH2 (analogue of Compound 133)
Ac-SEFhC(1)I[1-Me-Trp]QDWGEHRA(1)TGAES-[K*]-NH2 (analogue of Compound 135)
Ac-SEFhC(1)1[1-Me-Trp]QEWGEHRA(1)[Sar]EGA-[K*]-NH2 (analogue of Compound 120)
Ac-SEFhC(1)1[1-Me-Trp]QEWGEHRA(1)[Sar]EGE[Peg3][Peg3]-[K*]-NH2 (Compound 167; analogue of Compound 124, 153)
Ac-SEYhC(1)l[1-Me-Trp]QDWGEHRA(1)[Sar]EGA-[K*]-NH2 (analogue of Compound 112, 118)
Ac-SEYhC(1)l[1-Me-Trp]QDWGEHRA(1)[Sar]EGE[Peg3][Peg3]-[K*]-NH2 (analogue of Compound 117)
Ac-SEYhC(1)l[1-Me-Trp]QDWGEHRA(1)[Sar]EGE-[K*]-NH2 (analogue of Compound 114, 115, 116)
Ac-SEYhC(1)l[1-Me-Trp]QEW[Sar]EHRA(1)[Sar]EK[γGlu)A-[K*]-NH2 (analogue of Compound 121)
Ac-SEYhC(1)l[1-Me-Trp]QEWGEHRA(1)[Sar]EGA-[K*]-NH2 (analogue of Compound 122)
Ac-SEYhC(1)1[1-Me-Trp]QEWGEHRA(1)[Sar]EGE[Peg3][Peg3]-[K*]-NH2 (analogue of Compound 125)
Φ-EGSEYhC(1)l[1-Me-Trp]QDWGEHRA(1)[Sar]E-NH2 (analogue of Compound 107, 108)
Φ-ESSAIhC(1)IWQDWGEHRA(1)TEGE-NH2 (analogue of Compound 99)
Ac-SEFhC(1)1[1-Me-Trp]QDWGEHRA(1)[Sar]EGE[Peg3][Peg3][Peg3]-[K*]-NH2 (analogue of Compound 143)
Ac-SEFhC(1)1[1-Me-Trp]QDW[Sar]EHRA(1)[Sar]E[Peg3][Peg3]-[K*]-NH2 (Compound 164; analogue of Compound 144 and 147)
Ac-SEFhC(1)1[1-Me-Trp]QDW[Sar]EHRA(1)[Sar]E[Peg3][Peg3]-[K*]-OH (analogue of compound 162)
Ac-EFhC(1)l[1-Me-Trp]QDWGEHRA(1)[Sar]EA[Peg3][Peg3]-[K*]-NH2 (analogue of Compound 145)
Ac-GEFhC(1)l[1-Me-Trp]QDW[Sar]EHRA(1)[Sar]EAE[Peg3][Peg3]-[K*]-NH2 (analogue of Compound 149)
Ac-SEFhC(1)1[1-Me-Trp]QDW[Sar]EHRA(1)[Sar]EGE[Peg3]ES-[K*]-NH2 (Compound 166; analogue of Compound 150)
Ac-GEFhC(1)I[1-Me-Trp]QEWGEHRA(1)[Sar]EGE[Peg3]ES-[K*]-NH2 (analogue of Compound 155)
Ac-EFhC(1)1[1-Me-Trp]QEWGEHRA(1)[Sar]EA[Peg3][Peg3]-[K*]-NH2 (analogue of Compound 158)
wherein the side chains of residues designated hC(1) and A(1) form a cystathionine bridge.

34. A compstatin analogue according to claim 31 comprising a sequence selected from:
Ac-[K*]GSAIA(1)IWQDWGEHRhC(1)TEGE-NH2 (analogue of Compound 100) Ac-ASGEYA(1)l[1-Me-Trp]QDWGEHRhC(1)[Sar]EGE-[K*]-NH2 (analogue of Compound 113)
Ac-EFA(1)1[1-Me-Trp]QDWGEHRhC(1)EGE-[K*]-NH2 (analogue of Compound 134)
Ac-EGSAIA(1)IWQDWGEHRhC(1)TEG-[K*]-NH2 (analogue of Compound 101)
Ac-EGSAYA(1)l[1-Me-Trp]QDWGEH[K*]hC(1)[Sar]E-NH2 (analogue of Compound 103)
Ac-EGSAYA(1)1[1-Me-Trp]QDWGEHRhC(1)[Sar]EG-[K*]-NH2 (analogue of Compound 104)
Ac-EGSAYA(1)1[1-Me-Trp]QDWGEHRhC(1)[Sar]EGE-[K*]-NH2 (analogue of Compound 109)
Ac-EGSAYA(1)1[1-Me-Trp]QDWGEHRhC(1)[Sar]EGK-[K*]-NH2 (analogue of Compound 110)
Ac-EGSAYA(1)l[1-Me-Trp]QDWGEHRhC(1)[Sar]EK[γGlu]-[K*]-NH2 (Compound 159; analogue of Compound 111)
Ac-FA(1)1[1-Me-Trp]QDWGEHRhC(1)TGAES-[K*]-NH2 (analogue of Compound 102)
Ac-IA(1)IWQDWGEHRhC(1)TEG-[K*]-NH2 (analogue of Compound 92, 93, 95, 96, 98)
Ac-IA(1)IWQDWGEHRhC(1)TEGE-[K*]-NH2 (analogue of Compound 94, 97)
Ac-SAYA(1)1[1-Me-Trp]QDWGEHRhC(1)[Sar]E-[K*]-NH2 (analogue of Compound 105, 106)
Ac-SEFA(1)1[1-Me-Trp]QDWGEHRhC(1)[Sar]EGA-[K*]-NH2 (Compound 154; analogue of Compound 119)
Ac-SEFA(1)1[1-Me-Trp]QDWGEHRhC(1)[Sar]EGE[Peg3][Peg3]-[K*]-NH2 (Compound 146;
analogue of Compound 123, 152)
Ac-SEFA(1)1[1-Me-Trp]QDWGEHRhC(1)[Sar]EGEGGG-[K*]-NH2 (analogue of Compound 129)
Ac-SEFA(1)1[1-Me-Trp]QDWGEHRhC(1)[Sar]EGE[Peg3]-[K*]-NH2 (analogue of Compound 138)
Ac-SEFA(1)1[1-Me-Trp]QDWGEHRhC(1)[Sar]EGE[Peg3]ES-[K*]-NH2 (analogue of Compound 140)
Ac-SEFA(1)1[1-Me-Trp]QDWGEHRhC(1)[Sar]EGE[Peg3][Peg3]-[K*]-NH2 (Compound 160; analogue of Compound 127, 128)
Ac-SEFA(1)1[1-Me-Trp]QDWGEHRhC(1)[Sar]EGESES-[K*]-NH2 (analogue of Compound 139, 141)
Ac-SEFA(1)l[1-Me-Trp]QDWGEHRhC(1)[Sar]EK[γGlu]GGG-[K*]-NH2 (analogue of Compound 132)
Ac-SEFA(1)1[1-Me-Trp]QDWGEHRhC(1)TEGE[8-aminooctanoyl]-[K*]-NH2 (analogue of Compound 136)
Ac-SEFA(1)1[1-Me-Trp]QDWGEHRhC(1)TEGE[8-aminooctanoyl]E-[K*]-NH2 (analogue of Compound 137)
Ac-SEFA(1)l[1-Me-Trp]QDWGEHRhC(1)TEGEGGG-[K*]-NH2 (Compound 157; analogue of Compound 130, 131)
Ac-SEFA(1)1[1-Me-Trp]QDWGEHRhC(1)TEGE-[Peg3]ES-[K*]-NH2 (Compound 148; analogue of Compound 142, 165)
Ac-SEFA(1)1[1-Me-Trp]QDWGEHRhC(1)TEGE-[Peg3]ES-[K*]-OH (Compound 163)
Ac-SEFA(1)1[1-Me-Trp]QDWGEHRhC(1)TEGE-[Peg3][Peg3]-[K*]-NH2 (Compound 165; analogue of Compound 126)
Ac-SEFA(1)1[1-Me-Trp]QDWGEHRhC(1)TEK[γGlu]GGG-[K*]-NH2 (analogue of Compound 133)
Ac-SEFA(1)1[1-Me-Trp]QDWGEHRhC(1)TGAES-[K*]-NH2 (analogue of Compound 135)
Ac-SEFA(1)1[1-Me-Trp]QEWGEHRhC(1)[Sar]EGA-[K*]-NH2 (analogue of Compound 120)
Ac-SEFA(1)l[1-Me-Trp]QEWGEHRhC(1)[Sar]EGE[Peg3][Peg3]-[K*]-NH2 (Compound 153; analogue of Compound 124, 167)
Ac-SEYA(1)l[1-Me-Trp]QDWGEHRhC(1)[Sar]EGA-[K*]-NH2 (analogue of Compound 112, 118)
Ac-SEYA(1)1[1-Me-Trp]QDWGEHRhC(1)[Sar]EGE[Peg3][Peg3]-[K*]-NH2 (analogue of Compound 117)
Ac-SEYA(1)1[1-Me-Trp]QDWGEHRhC(1)[Sar]EGE-[K*]-NH2 (analogue of Compound 114, 115, 116)
Ac-SEYA(1)1[1-Me-Trp]QEW[Sar]EHRhC(1)[Sar]EK[γGlu]A-[K*]-NH2 (analogue of Compound 121)
Ac-SEYA(1)1[1-Me-Trp]QEWGEHRhC(1)[Sar]EGA-[K*]-NH2 (analogue of Compound 122)
Ac-SEYA(1)l[1-Me-Trp]QEWGEHRhC(1)[Sar]EGE[Peg3][Peg3]-[K*]-NH2 (analogue of Compound 125)
Φ-EGSEYA(1)1[1-Me-Trp]QDWGEHRhC(1)[Sar]E-NH2 (analogue of Compound 107, 108)
Φ-ESSAIA(1)IWQDWGEHRhC(1)TEGE-NH2 (analogue of Compound 99)
Ac-SEFA(1)l[1-Me-Trp]QDWGEHRhC(1)[Sar]EGE[Peg3][Peg3][Peg3]-[K*]-NH2 (analogue of Compound 143)
Ac-SEFA(1)1[1-Me-Trp]QDW[Sar]EHRhC(1)[Sar]E[Peg3][Peg3]-[K*]-NH2 (Compound 147; analogue of Compound 144, 164)
Ac-SEFA(1)I[1-Me-Trp]QDW[Sar]EHRhC(1)[Sar]E[Peg3][Peg3]-[K*]-OH (Compound 162)
Ac-EFA(1)I[1-Me-Trp]QDWGEHRhC(1)[Sar]EA[Peg3][Peg3]-[K*]-NH2 (analogue of Compound 145)
Ac-GEFA(1)1[1-Me-Trp]QDW[Sar]EHRhC(1)[Sar]EAE[Peg3][Peg3]-[K*]-NH2 (Compound 149)
Ac-SEFA(1)l[1-Me-Trp]QDW[Sar]EHRhC(1)[Sar]EGE[Peg3]ES-[K*]-NH2 (Compound 150; analogue of compound 166)
Ac-GEFA(1)I[1-Me-Trp]QEWGEHRhC(1)[Sar]EGE[Peg3]ES-[K*]-NH2 (Compound 155)
Ac-EFA(1)1[1-Me-Trp]QEWGEHRhC(1)[Sar]EA[Peg3][Peg3]-[K*]-NH2 (Compound 158)
wherein the side chains of residues designated A(1) and hC(1) form a cystathionine bridge.

35. A compstatin analogue according to claim 32 comprising a sequence selected from:
Ac-[K*]GSAIC(1)IWQDWGEHRA(1)TEGE-NH2 (analogue of Compound 100)
Ac-ASGEYC(1)1[1-Me-Trp]QDWGEHRA(1)[Sar]EGE-[K*]-NH2 (analogue of Compound 113)
Ac-EFC(1)l[1-Me-Trp]QDWGEHRA(1)EGE-[K*]-NH2 (analogue of Compound 134)
Ac-EGSAIC(1)IWQDWGEHRA(1)TEG-[K*]-NH2 (analogue of Compound 101)
Ac-EGSAYC(1)l[1-Me-Trp]QDWGEH[K*]A(1)[Sar]E-NH2 (analogue of Compound 103)
Ac-EGSAYC(1)1[1-Me-Trp]QDWGEHRA(1)[Sar]EG-[K*]-NH2 (analogue of Compound 104)
Ac-EGSAYC(1)1[1-Me-Trp]QDWGEHRA(1)[Sar]EGE-[K*]-NH2 (analogue of Compound 109)
Ac-EGSAYC(1)1[1-Me-Trp]QDWGEHRA(1)[Sar]EGK-[K*]-NH2 (analogue of Compound 110)
Ac-EGSAYC(1)I[1-Me-Trp]QDWGEHRA(1)[Sar]EK[γGlu]-[K*]-NH2 (analogue of Compound 111, 159)
Ac-FC(1)1[1-Me-Trp]QDWGEHRA(1)TGAES-[K*]-NH2 (analogue of Compound 102)
Ac-IC(1)IWQDWGEHRA(1)TEG-[K*]-NH2 (analogue of Compound 92, 93, 95, 96, 98)
Ac-IC(1)IWQDWGEHRA(1)TEGE-[K*]-NH2 (analogue of Compound 94, 97)
Ac-SAYC(1)I[1-Me-Trp]QDWGEHRA(1)[Sar]E-[K*]-NH2 (analogue of Compound 105, 106)
Ac-SEFC(1)l[1-Me-Trp]QDWGEHRA(1)[Sar]EGA-[K*]-NH2 (analogue of Compound 119, 154)
Ac-SEFC(1)1[1-Me-Trp]QDWGEHRA(1)[Sar]EGE[Peg3][Peg3]-[K*]-NH2 (analogue of Compound 123, 146 and 152)
Ac-SEFC(1)1[1-Me-Trp]QDWGEHRA(1)[Sar]EGEGGG-[K*]-NH2 (analogue of Compound 129)
Ac-SEFC(1)1[1-Me-Trp]QDWGEHRA(1)[Sar]EGE[Peg3]-[K*]-NH2 (analogue of Compound 138)
Ac-SEFC(1)I[1-Me-Trp]QDWGEHRA(1)[Sar]EGE[Peg3]ES-[K*]-NH2 (analogue of Compound 140)
Ac-SEFC(1)[1-Me-Trp]QDWGEHRA(1)[Sar]EGE[Peg3][Peg3]-[K*]-NH2 (analogue of Compound 127, 128, 160)
Ac-SEFC(1)1[1-Me-Trp]QDWGEHRA(1)[Sar]EGESES-[K*]-NH2 (analogue of Compound 139, 141)
Ac-SEFC(1)l[1-Me-Trp]QDWGEHRA(1)[Sar]EK[γGlu]GGG-[K*]-NH2 (analogue of Compound 132)
Ac-SEFC(1)1[1-Me-Trp]QDWGEHRA(1)TEGE[8-aminooctanoyl]-[K*]-NH2 (analogue of Compound 136)
Ac-SEFC(1)l[1-Me-Trp]QDWGEHRA(1)TEGE[8-aminooctanoyl]E-[K*]-NH2 (analogue of Compound 137)
Ac-SEFC(1)1[1-Me-Trp]QDWGEHRA(1)TEGEGGG-[K*]-NH2 (analogue of Compound 130, 131, 157)
Ac-SEFC(1)1[1-Me-Trp]QDWGEHRA(1)TEGE-[Peg3]ES-[K*]-NH2 (analogue of Compound 142, 148, 165)
Ac-SEFC(1)1[1-Me-Trp]QDWGEHRA(1)TEGE-[Peg3]ES-[K*]-OH (analogue of Compound 163)
Ac-SEFC(1)l[1-Me-Trp]QDWGEHRA(1)TEGE-[Peg3][Peg3]-[K*]-NH2 (analogue of Compound 126, 156)
Ac-SEFC(1)1[1-Me-Trp]QDWGEHRA(1)TEK[γGlu]GGG-[K*]-NH2 (analogue of Compound 133)
Ac-SEFC(1)l[1-Me-Trp]QDWGEHRA(1)TGAES-[K*]-NH2 (analogue of Compound 135)
Ac-SEFC(1)l[1-Me-Trp]QEWGEHRA(1)[Sar]EGA-[K*]-NH2 (analogue of Compound 120)
Ac-SEFC(1)1[1-Me-Trp]QEWGEHRA(1)[Sar]EGE[Peg3][Peg3]-[K*]-NH2 (analogue of Compound 124, 153, 167)
Ac-SEYC(1)1[1-Me-Trp]QDWGEHRA(1)[Sar]EGA-[K*]-NH2 (analogue of Compound 112, 118)
Ac-SEYC(1)1[1-Me-Trp]QDWGEHRA(1)[Sar]EGE[Peg3][Peg3]-[K*]-NH2 (analogue of Compound 117)
Ac-SEYC(1)I[1-Me-Trp]QDWGEHRA(1)[Sar]EGE-[K*]-NH2 (analogue of Compound 114, 115, 116)
Ac-SEYC(1)l[1-Me-Trp]QEW[Sar]EHRA(1)[Sar]EK[γGlu]A-[K*]-NH2 (analogue of Compound 121)
Ac-SEYC(1)l[1-Me-Trp]QEWGEHRA(1)[Sar]EGA-[K*]-NH2 (analogue of Compound 122)
Ac-SEYC(1)l[1-Me-Trp]QEWGEHRA(1)[Sar]EGE[Peg3][Peg3]-[K*]-NH2 (analogue of Compound 125)
Φ-EGSEYC(1)I[1-Me-Trp]QDWGEHRA(1)[Sar]E-NH2 (analogue of Compound 107, 108)
Φ-ESSAIC(1)IWQDWGEHRA(1)TEGE-NH2 (analogue of Compound 99)
Ac-SEFC(1)I[1-Me-Trp]QDWGEHRA(1)[Sar]EGE[Peg3][Peg3][Peg3]-[K*]-NH2 (analogue of Compound 143)
Ac-SEFC(1)1[1-Me-Trp]QDW[Sar]EHRA(1)[Sar]E[Peg3][Peg3]-[K*]-NH2 (analogue of Compound 144, 147, 164)
Ac-SEFC(1)1[1-Me-Trp]QDW[Sar]EHRA(1)[Sar]E[Peg3][Peg3]-[K*]-OH (analogue of Compound 62)
Ac-EFC(1)l[1-Me-Trp]QDWGEHRA(1)[Sar]EA[Peg3][Peg3]-[K*]-NH2 (analogue of Compound 145)
Ac-GEFC(1)1[1-Me-Trp]QDW[Sar]EHRA(1)[Sar]EAE[Peg3][Peg3]-[K*]-NH2 (analogue of Compound 149)
Ac-SEFC(1)I[1-Me-Trp]QDW[Sar]EHRA(1)[Sar]EGE[Peg3]ES-[K*]-NH2 (analogue of Compound 150, 166)
Ac-GEFC(1)1[1-Me-Trp]QEWGEHRA(1)[Sar]EGE[Peg3]ES-[K*]-NH2 (Compound 155)
Ac-EFC(1)1[1-Me-Trp]QEWGEHRA(1)[Sar]EA[Peg3][Peg3]-[K*]-NH2 (Compound 158)
wherein the side chains of residues designated C(1) and A(1) form a lanthionine bridge.

36. A compstatin analogue according to any one of claims 1 to 8, 12 to 23, or 30 to 35 which comprises a lipophilic group Φ, and wherein the lipophilic group Φ is Z¹—or Z¹-Z²—wherein
Z¹ is A-C₁₂₋₂₂ alkylene—(CO)—;
where A is H or —COOH, and wherein the alkylene may be linear or branched and may be saturated or unsaturated, and may optionally incorporate a phenylene or piperazinylene moiety in its length; and
Z² is a sequence of 1 to 6 residues of compounds selected from γ-Glu, E, K, Orn, S, T, A, pi-Ala, G, P, V, L, I, Y, Q, N, Dapa, Gaba, or Aib, or a corresponding D form thereof, 5-aminopentanoyl, 6-aminohexanoyl, 7-aminoheptanoyl, 8-aminooctanoyl, 9-aminononanoyl, and 10-aminodecanoyl. 8-amino-3,6-dioxaoctanoic acid (Peg3), 11-amino-3,6,9-trioxaundecanoic acid (Peg4) and (piperazine-1-yl)-carboxylic acid.

37. A compstatin analogue according to claim 36 wherein Z¹ is selected from:
Dodecanoyl i.e. H—(CH₂)₁₁—(CO)—;
Tetradecanoyl i.e. H—(CH₂)₁₃—(CO)—;
Hexadecanoyl, i.e. H—(CH₂)₁₅—(CO)—;
13-carboxytridecanoyl, i.e. HOOC—(CH₂)₁₂—(CO)—;
15-carboxypentadecanoyl, i.e. HOOC—(CH₂)₁₄—(CO)—;
17-carboxyheptadecanoyl, i.e. HOOC—(CH₂)₁₆—(CO)—;
19-carboxynonadecanoyl, i.e. HOOC—(CH₂)₁₃—(CO)—; or
21-carboxyheneicosanoyl, i.e. HOOC—(CH₂)₂₀—(CO)—

38. A compstatin analogue according to claim 36 or claim 37 wherein Z² is selected from:
[γGlu],
[γGlu][Peg3][Peg3]-;
[(Piperazine-1-yl)-acetyl][Peg3][Peg3];
[γGlu]G[γGlu];
[γGlu]K[γGlu];
[γGlu]KG[γGlu]; or
[γGlu]G[Peg3][γGlu][Peg3].
For example, Z² may be, or may comprise:

39. A compstatin analogue according to any one of claims 36 to 38 wherein Z¹— or Z¹—Z²— is selected from:
15-carboxy-pentadecanoyl;
15-carboxy-pentadecanoyl[γGlu]-,
15-carboxy-pentadecanoyl[γGlu][Peg3][Peg3]-;
19-carboxy-nonadecanoyl[γGlu][Peg3][Peg3]-;
15-carboxy-pentadecanoyl-[(Piperazine-1-yl)-acetyl][Peg3][Peg3]);
17-carboxy-heptadecanoyl[γGlu]G[γGlu];
17-carboxy-heptadecanoyl[γGlu]K[γGlu];
17-carboxy-heptadecanoyl[γGlu]KG[γGlu];
17-carboxy-heptadecanoyl[γGlu]G(Peg3)[γGlu]-(Peg3);
15-carboxy-hexadecanoyl[γGlu]G[γGlu];
17-carboxy-heptadecanoyl;
17-carboxy-heptadecanoyl[γGlu]]19-carboxy-nonadecanoyl[γGlu]G[γGlu]; and
17-carboxy-heptadecanoyl[γGlu][Peg3][Peg3].

40. A compstatin analogue according to claim 1 which is:
Ac-IhC(1)IWQDWGEHRA(1)TEG-K([15-carboxy-pentadecanoyl][γGlu])-NH2 (analogue of Compound 92)
Ac-IhC(1)IWQDWGEHRA(1)TEG-K([15-carboxy-pentadecanoyl][γGlu][Peg3][Peg3])-NH2 (analogue of Compound 93)
Ac-IhC(1)IWQDWGEHRA(1)TEGE-K([15-carboxy-pentadecanoyl][γGlu][Peg3][Peg3])-NH2 (analogue of Compound 94)
Ac-IhC(1)IWQDWGEHRA(1)TEG-K((15-carboxy-pentadecanoyl)-[(Piperazine-1-yl)-acetyl][Peg3][Peg3])-NH2 (analogue of Compound 95)
Ac-IhC(1)IWQDWGEHRA(1)TEG-K([17-carboxy-heptadecanoyl][γGlu][Peg3][Peg3])-NH2 (analogue of Compound 96)
Ac-IhC(1)IWQDWGEHRA(1)TEGE-K([17-carboxy-heptadecanoyl][γGlu][Peg3][Peg3])-NH2 (analogue of Compound 97)
Ac-IhC(1)IWQDWGEHRA(1)TEG-K([19-carboxy-nonadecanoyl][γGlu][Peg3][Peg3])-NH2 (analogue of Compound 98)
[15-Carboxy-pentadecanoyl]-ESSAIhC(1)IWQDWGEHRA(1)TEGE-NH2 (analogue of Compound 99)
Ac-[K([15-carboxy-pentadecanoyl][γGlu][Peg3][Peg3])]-GSAIhC(1)IWQDWGEHRA(1)TEGE-NH2 (analogue of Compound 100)
Ac-EGSAIhC(1)IWQDWGEHRA(1)TEG-K([15-carboxy-pentadecanoyl][γGlu])-NH2 (analogue of Compound 101)
Ac-FhC(1)I[1-Me-Trp]QDWGEHRA(1)TGAES-K([15-carboxy-pentadecanoyl][γGlu][Peg3][Peg3])-NH2 (analogue of Compound 102)
Ac-EGSAYhC(1)1[1-Me-Trp]QDWGEH-K([15-carboxy-pentadecanoyl][γGlu][Peg3][Peg3])-A(1)[Sar]E-NH2 (analogue of Compound 103)
Ac-EGSAYhC(1)1[1-Me-Trp]QDWGEHRA(1)[Sar]EG-K([15-carboxy-pentadecanoyl][γGlu][Peg3][Peg3])-NH2 (analogue of Compound 104)
Ac-SAYhC(1)1[1-Me-Trp]QDWGEHRA(1)[Sar]E-K([17-carboxy-heptadecanoyl][γGlu]KG[γGlu])-NH2 (analogue of Compound 105)
Ac-SAYhC(1)l[1-Me-Trp]QDWGEHRA(1)[Sar]E-K([17-carboxy-heptadecanoyl][γGlu]G[γGlu])-NH2 (analogue of Compound 106)
[15-Carboxy-pentadecanoyl]-EGSEYhC(1)1[1-Me-Trp]QDWGEHRA(1)[Sar]E-NH2 (analogue of Compound 107)
[17-Carboxy-heptadecanoyl]-EGSEYhC(1)l[1-Me-Trp]QDWGEHRA(1)[Sar]E-NH2 (analogue of Compound 108)
Ac-EGSAYhC(1)l[1-Me-Trp]QDWGEHRA(1)[Sar]EGE-K([17-carboxy-heptadecanoyl][γGlu]G[γGlu])-NH2 (analogue of Compound 109)
Ac-EGSAYhC(1)1[1-Me-Trp]QDWGEHRA(1)[Sar]EGK-K([17-carboxy-heptadecanoyl][γGlu]G[γGlu])-NH2 (analogue of Compound 110)
Ac-EGSAYhC(1)1[1-Me-Trp]QDWGEHRA(1)[Sar]EK([γGlu]-K([17-carboxy-heptadecanoyl][γGlu](peg3)(peg3))-NH2 (analogue of Compound 111, 159)
Ac-SEYhC(1)I[1-Me-Trp]QDWGEHRA(1)[Sar]EGA-K([17-carboxy-heptadecanoyl][γGlu]-G[γGlu])-NH2 (analogue of Compound 112)
Ac-ASGEYhC(1)1[1-Me-Trp]QDWGEHRA(1)[Sar]EGE-K([17-carboxy-heptadecanoyl][γGlu]-G[γGlu])-NH2 (analogue of Compound 113)
Ac-SEYhC(1)l[1-Me-Trp]QDWGEHRA(1)[Sar]EGE-K([17-carboxy-heptadecanoyl][γGlu]-G[γGlu])-NH2 (analogue of Compound 114)
Ac-SEYhC(1)1[1-Me-Trp]QDWGEHRA(1)[Sar]EGK-K([17-carboxy-heptadecanoyl][γGlu]-G[γGlu])-NH2 (analogue of Compound 115)
Ac-SEYhC(1)1[1-Me-Trp]QDWGEHRA(1)[Sar]EGE-K([17-carboxy-heptadecanoyl][γGlu]-K[γGlu])-NH2 (analogue of Compound 116)
Ac-SEYhC(1)l[1-Me-Trp]QDWGEHRA(1)[Sar]EGE[Peg3][Peg3]-K([17-carboxy-heptadecanoyl][γGlu]-G[γGlu])-NH2 (analogue of Compound 117)
Ac-SEYhC(1)l[1-Me-Trp]QDWGEHRA(1)[Sar]EGA-K([17-carboxy-heptadecanoyl]-[γGlu]G[Peg3][γGlu][Peg3])-NH2 (analogue of Compound 118)
Ac-SEFhC(1)1[1-Me-Trp]QDWGEHRA(1)[Sar]EGA-K([17-carboxy-heptadecanoyl-][γGlu]G[Peg3][γGlu][Peg3])-NH2 (analogue of Compound 119, 154)
Ac-SEFhC(1)1[1-Me-Trp]QEWGEHRA(1)[Sar]EGA-K([17-carboxy-heptadecanoyl]-[γGlu]G[Peg3][γGlu][Peg3])-NH2 (analogue of Compound 120)
Ac-SEYhC(1)1[1-Me-Trp]QEW[Sar]EHRA(1)[Sar]EK[γGlu]A-K([17-carboxy-heptadecanoyl]-[γGlu]G[Peg3][γGlu][Peg3])-NH2 (analogue of Compound 121)
Ac-SEYhC(1)1[1-Me-Trp]QEWGEHRA(1)[Sar]EGA-K([17-carboxy-heptadecanoyl]-[γGlu]G[Peg3][γGlu][Peg3])-NH2 (analogue of Compound 122)
Ac-SEFhC(1)1[1-Me-Trp]QDWGEHRA(1)[Sar]EGE[Peg3][Peg3]-K([17-carboxy-heptadecanoyl][γGlu]G[γGlu])-NH2 (Compound 152; analogue of Compound 123 and 146)
Ac-SEFhC(1)1[1-Me-Trp]QEWGEHRA(1)[Sar]EGE[Peg3[Peg3]-K([17-carboxy-heptadecanoyl]-[γGlu]G[γGlu])-NH2 (Compound 167; analogue of Compound 124, 153)
Ac-SEYhC(1)1[1-Me-Trp]QEWGEHRA(1)[Sar]EGE[Peg3][Peg3]-K([17-carboxy-heptadecanoyl][γGlu]G[γGlu])-NH2 (analogue of Compound 125)
Ac-SEFhC(1)I[1-Me-Trp]QDWGEHRA(1)TEGE[Peg3][Peg3]-K([17-carboxy-heptadecanoyl)[γGlu]G[γGlu]])-NH2 (analogue of Compound 126, 156)
Ac-SEFhC(1)1[1-Me-Trp]QDWGEHRA(1)[Sar]-EGE-[Peg3][Peg3]-K([15-carboxy-pentadecanoyl][γGlu]G[γGlu])-NH2 (analogue of Compound 127, 160)
Ac-SEFhC(1)l[1-Me-Trp]QDWGEHRA(1)[Sar]EGE[Peg3][Peg3]-K([19-carboxy-nonadecanoyl][γGlu]G[γGlu])-NH2 (analogue of Compound 128)
Ac-SEFhC(1)1[1-Me-Trp]QDWGEHRA(1)[Sar]EGEGGG-K([17-carboxy-heptadecanoyl]-[γGlu]G[γGlu])-NH2 (analogue of Compound 129)
Ac-SEFhC(1)1[1-Me-Trp]QDWGEHRA(1)TEGEGGG-K([17-carboxy-heptadecanoyl]-[γGlu]G[γGlu])-NH2 (analogue of Compound 130, 157)
Ac-SEFhC(1)1[1-Me-Trp]-QDWGEHRA(1)TEGEGGG-K([15-carboxy-pentadecanoyl][γGlu]-G[γGlu])-NH2 (analogue of Compound 131)
Ac-SEFhC(1)1[1-Me-Trp]-QDWGEHRA(1)[Sar]EK[γGlu]GGG-K([17-carboxy-heptadecanoyl][γGlu]-G[γGlu])-NH2 (analogue of Compound 132)
Ac-SEFhC(1)1[1-Me-Trp]QDWGEHRA(1)TEK[γGlu]GGG-K([17-carboxy-heptadecanoyl][γGlu]-G[γGlu])-NH2 (analogue of Compound 133)
Ac-EFhC(1)1[1-Me-Trp]QDWGEHRA(1)EGE-K([17-carboxy-heptadecanoyl][γGlu]G[γGlu])-NH2 (analogue of Compound 134, 161)
Ac-SEFhC(1)1[1-Me-Trp]QDWGEHRA(1)TGAES-K([15-carboxy-hexadecanoyl][γGlu]G[γGlu])-NH2 (analogue of Compound 135)
Ac-SEFhC(1)l[1-Me-Trp]QDWGEHRA(1)TEGE[8-aminooctanoyl]-K([17-carboxy-heptadecanoyl][γGlu]-G[γGlu])-NH2 (analogue of Compound 136)
Ac-SEFhC(1)1[1-Me-Trp]QDWGEHRA(1)TEGE[8-aminooctanoyl]E-K([17-carboxy-heptadecanoyl][γGlu]G[γGlu]])-NH2 (analogue of Compound 137)
Ac-SEFhC(1)1[1-Me-Trp]QDWGEHRA(1)[Sar]EGE[Peg3]-K([17-carboxy-heptadecanoyl]-[γGlu]G[γGlu])-NH2 (analogue of Compound 138)
Ac-SEFhC(1)1[1-Me-Trp]QDWGEHRA(1)[Sar]EGESES-K([17-carboxy-heptadecanoyl]-[γGlu]G[γGlu])-NH2 (analogue of Compound 139)
Ac-SEFhC(1)1[1-Me-Trp]QDWGEHRA(1)[Sar]EGE[Peg3]ES-K([17-carboxy-heptadecanoyl]-[γGlu]G[γGlu])-NH2 (analogue of Compound 140)
Ac-SEFhC(1)1[1-Me-Trp]QDWGEHRA(1)[Sar]EGESES-K([17-carboxy-heptadecanoyl][γGlu])-NH2 (analogue of Compound 141)
Ac-SEFhC(1)1[1-Me-Trp]QDWGEHRA(1)TEGE[Peg3]ES-K([17-carboxy-heptadecanoyl][γGlu])-NH2 (Compound 165; analogue of Compound 142 and 148)
Ac-SEFhC(1)1[1-Me-Trp]QDWGEHRA(1)TEGE[Peg3]ES-K([17-carboxy-heptadecanoyl][γGlu])-OH (analogue of Compound 163)
Ac-SEFhC(1)1[1-Me-Trp]QDWGEHRA(1)[Sar]EGE[Peg3][Peg3][Peg3]-K([17-carboxy-heptadecanoyl][γGlu]G[γGlu])-NH2 (analogue of Compound 143)
Ac-SEFhC(1)I[1-Me-Trp]QDW[Sar]EHRA(1)[Sar]E[Peg3][Peg3]-K([17-carboxy-heptadecanoyl][γGlu]G[γGlu])-NH2 (Compound 164; analogue of Compound 144 and 147)
Ac-SEFhC(1)1[1-Me-Trp]QDW[Sar]EHRA(1)[Sar]E[Peg3][Peg3]-K([17-carboxy-heptadecanoyl][γGlu]G[γGlu])-OH (analogue of Compound 162)
Ac-EFhC(1)l[1-Me-Trp]QDWGEHRA(1)[Sar]EA[Peg3][Peg3]-K([17-carboxy-heptadecanoyl][γGlu]G[γGlu])-NH2 (analogue of Compound 145).
Ac-GEFhC(1)1[1-Me-Trp]QDW[Sar]EHRA(1)[Sar]EAE[Peg3][Peg3]-K([17-Carboxy-heptadecanoyl][γGlu]G[γGlu])-NH2 (analogue of Compound 149)
Ac-SEFhC(1)1[1-Me-Trp]QDW[Sar]EHRA(1)[Sar]EGE[Peg3]ES-K([17-Carboxy-heptadecanoyl][γGlu]G[γGlu])-NH2 (Compound 166; analogue of Compound 150)
Ac-GEFhC(1)1[1-Me-Trp]QEWGEHRA(1)[Sar]EGE[Peg3]ES-K([17-Carboxy-heptadecanoyl][γGlu]G[γGlu])-NH2 (analogue of Compound 155)
Ac-EFhC(1)1[1-Me-Trp]QEWGEHRA(1)[Sar]EA[Peg3][Peg3]-K([17-Carboxy-heptadecanoyl][γGlu]G[γGlu])-NH2 (analogue of Compound 158)
wherein the side chains of residues designated hC(1) and A(1) form a cystathionine bridge.

41. A compstatin analogue according to claim 1 which is:
Ac-IA(1)IWQDWGEHRhC(1)TEG-K([15-carboxy-pentadecanoyl][γGlu])-NH2 (analogue of Compound 92)
Ac-IA(1)IWQDWGEHRhC(1)TEG-K([15-carboxy-pentadecanoyl][γGlu][Peg3][Peg3])-NH2 (analogue of Compound 93)
Ac-IA(1)IWQDWGEHRhC(1)TEGE-K([15-carboxy-pentadecanoyl][γGlu][Peg3][Peg3])-NH2 (analogue of Compound 94)
Ac-IA(1)IWQDWGEHRhC(1)TEG-K((15-carboxy-pentadecanoyl)-[(Piperazine-1-yl)-acetyl][Peg3][Peg3])-NH2 (analogue of Compound 95)
Ac-IA(1)IWQDWGEHRhC(1)TEG-K([17-carboxy-heptadecanoyl][γGlu][Peg3][Peg3])-NH2 (analogue of Compound 96)
Ac-IA(1)IWQDWGEHRhC(1)TEGE-K([17-carboxy-heptadecanoyl][γGlu][Peg3][Peg3])-NH2 (analogue of Compound 97)
Ac-IA(1)IWQDWGEHRhC(1)TEG-K([19-carboxy-nonadecanoyl][γGlu][Peg3][Peg3])-NH2 (analogue of Compound 98)
[15-Carboxy-pentadecanoyl]-ESSAIA(1)IWQDWGEHRhC(1)TEGE-NH2 (analogue of Compound 99)
Ac-[K([15-carboxy-pentadecanoyl][γGlu][Peg3][Peg3])]-GSAIA(1)IWQDWGEHRhC(1)TEGE-NH2 (analogue of Compound 100)
Ac-EGSAIA(1)IWQDWGEHRhC(1)TEG-K([15-carboxy-pentadecanoyl][γGlu])-NH2 (analogue of Compound 101)
Ac-FA(1)1[1-Me-Trp]QDWGEHRhC(1)TGAES-K([15-carboxy-pentadecanoyl][γGlu][Peg3][Peg3])-NH2 (analogue of Compound 102)
Ac-EGSAYA(1)I[1-Me-Trp]QDWGEH-K([15-carboxy-pentadecanoyl][γGlu][Peg3][Peg3])-hC(1)[Sar]E-NH2 (analogue of Compound 103)
Ac-EGSAYA(1)1[1-Me-Trp]QDWGEHRhC(1)[Sar]EG-K([15-carboxy-pentadecanoyl][γGlu][Peg3][Peg3])-NH2 (analogue of Compound 104)
Ac-SAYA(1)l[1-Me-Trp]QDWGEHRhC(1)[Sar]E-K([17-carboxy-heptadecanoyl][γGlu]KG[γGlu])-NH2 (analogue of Compound 105)
Ac-SAYA(1)I[1-Me-Trp]QDWGEHRhC(1)[Sar]E-K([17-carboxy-heptadecanoyl][γGlu]G[γGlu])-NH2 (analogue of Compound 106)
[15-Carboxy-pentadecanoyl]-EGSEYA(1)1[1-Me-Trp]QDWGEHRhC(1)[Sar]E-NH2 (analogue of Compound 107)
[17-Carboxy-heptadecanoyl]-EGSEYA(1)1[1-Me-Trp]QDWGEHRhC(1)[Sar]E-NH2 (analogue of Compound 108)
Ac-EGSAYA(1)1[1-Me-Trp]QDWGEHRhC(1)[Sar]EGE-K([17-carboxy-heptadecanoyl][γGlu]G[γGlu])-NH2 (analogue of Compound 109)
Ac-EGSAYA(1)I[1-Me-Trp]QDWGEHRhC(1)[Sar]EGK-K([17-carboxy-heptadecanoyl][γGlu]G[γGlu])-NH2 (analogue of Compound 110)
Ac-EGSAYA(1)1[1-Me-Trp]QDWGEHRhC(1)[Sar]EK([γGlu]-K([17-carboxy-heptadecanoyl][γGlu](peg3)(peg3))-NH2 (Compound 159; analogue of Compound 111)
Ac-SEYA(1)1[1-Me-Trp]QDWGEHRhC(1)[Sar]EGA-K([17-carboxy-heptadecanoyl][γGlu]-G[γGlu])-NH2 (analogue of Compound 112)
Ac-ASGEYA(1)1[1-Me-Trp]QDWGEHRhC(1)[Sar]EGE-K([17-carboxy-heptadecanoyl][γGlu]-G[γGlu])-NH2 (analogue of Compound 113)
Ac-SEYA(1)1[1-Me-Trp]QDWGEHRhC(1)[Sar]EGE-K([17-carboxy-heptadecanoyl][γGlu]-G[γGlu])-NH2 (analogue of Compound 114)
Ac-SEYA(1)1[1-Me-Trp]QDWGEHRhC(1)[Sar]EGK-K([17-carboxy-heptadecanoyl][γGlu]-G[γGlu])-NH2 (analogue of Compound 115)
Ac-SEYA(1)1[1-Me-Trp]QDWGEHRhC(1)[Sar]EGE-K([17-carboxy-heptadecanoyl][γGlu]-K[γGlu])-NH2 (analogue of Compound 116)
Ac-SEYA(1)I[1-Me-Trp]QDWGEHRhC(1)[Sar]EGE[Peg3][Peg3]-K([17-carboxy-heptadecanoyl][γGlu]-G[γGlu])-NH2 (analogue of Compound 117)
Ac-SEYA(1)l[1-Me-Trp]QDWGEHRhC(1)[Sar]EGA-K([17-carboxy-heptadecanoyl]-[γGlu]G[Peg3][γGlu][Peg3])-NH2 (analogue of Compound 118)
Ac-SEFA(1)1[1-Me-Trp]QDWGEHRhC(1)[Sar]EGA-K([17-carboxy-heptadecanoyl-][γGlu]G[Peg3][γGlu][Peg3])-NH2 (Compound 154; analogue of Compound 119)
Ac-SEFA(1)1[1-Me-Trp]QEWGEHRhC(1)[Sar]EGA-K([17-carboxy-heptadecanoyl]-[γGlu]G[Peg3][γGlu][Peg3])-NH2 (analogue of Compound 120)
Ac-SEYA(1)I[1-Me-Trp]QEW[Sar]EHRhC(1)[Sar]EK[γGlu]A-K([17-carboxy-heptadecanoyl]-[γGlu]G[Peg3][γGlu][Peg3])-NH2 (analogue of Compound 121)
Ac-SEYA(1)1[1-Me-Trp]QEWGEHRhC(1)[Sar]EGA-K([17-carboxy-heptadecanoyl]-[γGlu]G[Peg3][γGlu][Peg3])-NH2 (analogue of Compound 122)
Ac-SEFA(1)1[1-Me-Trp]QDWGEHRhC(1)[Sar]EGE[Peg3][Peg3]-K([17-carboxy-heptadecanoyl][γGlu]G[γGlu])-NH2 (Compound 146; analogue of Compound 123, 152)
Ac-SEFA(1)l[1-Me-Trp]QEWGEHRhC(1)[Sar]EGE[Peg3[Peg3]-K([17-carboxy-heptadecanoyl]-[γGlu]G[γGlu])-NH2 (Compound 153, analogue of Compound 124, 167)
Ac-SEYA(1)1[1-Me-Trp]QEWGEHRhC(1)[Sar]EGE[Peg3][Peg3]-K([17-carboxy-heptadecanoyl][γGlu]G[γGlu])-NH2 (analogue of Compound 125)
Ac-SEFA(1)l[1-Me-Trp]QDWGEHRhC(1)TEGE[Peg3][Peg3]-K([17-carboxy-heptadecanoyl)[γGlu]G[γGlu]])-NH2 (Compound 156; analogue of Compound 126)
Ac-SEFA(1)1[1-Me-Trp]QDWGEHRhC(1)[Sar]-EGE-[Peg3][Peg3]-K([15-carboxy-pentadecanoyl][γGlu]G[γGlu])-NH2 (Compound 160; analogue of Compound 127)
Ac-SEFA(1)1[1-Me-Trp]QDWGEHRhC(1)[Sar]EGE[Peg3][Peg3]-K([19-carboxy-nonadecanoyl][γGlu]G[γGlu])-NH2 (analogue of Compound 128)
Ac-SEFA(1)1[1-Me-Trp]QDWGEHRhC(1)[Sar]EGEGGG-K([17-carboxy-heptadecanoyl]-[γGlu]G[γGlu])-NH2 (analogue of Compound 129)
Ac-SEFA(1)1[1-Me-Trp]QDWGEHRhC(1)TEGEGGG-K([17-carboxy-heptadecanoyl]-[γGlu]G[γGlu])-NH2 (Compound 157; analogue of Compound 130)
Ac-SEFA(1)1[1-Me-Trp]-QDWGEHRhC(1)TEGEGGG-K([15-carboxy-pentadecanoyl][γGlu]-G[γGlu])-NH2 (analogue of Compound 131)
Ac-SEFA(1)I[1-Me-Trp]-QDWGEHRhC(1)[Sar]EK[γGlu]GGG-K([17-carboxy-heptadecanoyl][γGlu]-G[γGlu])-NH2 (analogue of Compound 132)
Ac-SEFA(1)1[1-Me-Trp]QDWGEHRhC(1)TEK[γGlu]GGG-K([17-carboxy-heptadecanoyl][γGlu]-G[γGlu])-NH2 (analogue of Compound 133)
Ac-EFA(1)l[1-Me-Trp]QDWGEHRhC(1)EGE-K([17-carboxy-heptadecanoyl][γGlu]G[γGlu])-NH2 (Compound 161; analogue of Compound 134)
Ac-SEFA(1)1[1-Me-Trp]QDWGEHRhC(1)TGAES-K([15-carboxy-hexadecanoyl][γGlu]G[γGlu])-NH2 (analogue of Compound 135)
Ac-SEFA(1)1[1-Me-Trp]QDWGEHRhC(1)TEGE[8-aminooctanoyl]-K([17-carboxy-heptadecanoyl][γGlu]-G[γGlu])-NH2 (analogue of Compound 136)
Ac-SEFA(1)1[1-Me-Trp]QDWGEHRhC(1)TEGE[8-aminooctanoyl]E-K([17-carboxy-heptadecanoyl][γGlu]G[γGlu]])-NH2 (analogue of Compound 137)
Ac-SEFA(1)l[1-Me-Trp]QDWGEHRhC(1)[Sar]EGE[Peg3]-K([17-carboxy-heptadecanoyl]-[γGlu]G[γGlu])-NH2 (analogue of Compound 138)
Ac-SEFA(1)I[1-Me-Trp]QDWGEHRhC(1)[Sar]EGESES-K([17-carboxy-heptadecanoyl]-[γGlu]G[γGlu])-NH2 (analogue of Compound 139)
Ac-SEFA(1)1[1-Me-Trp]QDWGEHRhC(1)[Sar]EGE[Peg3]ES-K([17-carboxy-heptadecanoyl]-[γGlu]G[γGlu])-NH2 (analogue of Compound 140)
Ac-SEFA(1)1[1-Me-Trp]QDWGEHRhC(1)[Sar]EGESES-K([17-carboxy-heptadecanoyl][γGlu])-NH2 (analogue of Compound 141)
Ac-SEFA(1)1[1-Me-Trp]QDWGEHRhC(1)TEGE[Peg3]ES-K([17-carboxy-heptadecanoyl][γGlu])-NH2 (Compound 148; analogue of Compound 142, 165)
Ac-SEFA(1)1[1-Me-Trp]QDWGEHRhC(1)TEGE[Peg3]ES-K([17-carboxy-heptadecanoyl][γGlu])-OH (Compound 163)
Ac-SEFA(1)1[1-Me-Trp]QDWGEHRhC(1)[Sar]EGE[Peg3][Peg3][Peg3]-K([17-carboxy-heptadecanoyl][γGlu]G[γGlu])-NH2 (analogue of Compound 143)
Ac-SEFA(1)1[1-Me-Trp]QDW[Sar]EHRhC(1)[Sar]E[Peg3][Peg3]-K([17-carboxy-heptadecanoyl][γGlu]G[γGlu])-NH2 (Compound 147; analogue of Compound 144, 164)
Ac-SEFA(1)1[1-Me-Trp]QDW[Sar]EHRhC(1)[Sar]E[Peg3][Peg3]-K([17-carboxy-heptadecanoyl][γGlu]G[γGlu])-OH (Compound 162)
Ac-EFA(1)1[1-Me-Trp]QDWGEHRhC(1)[Sar]EA[Peg3][Peg3]-K([17-carboxy-heptadecanoyl][γGlu]G[γGlu])-NH2 (analogue of Compound 145)
Ac-GEFA(1)l[1-Me-Trp]QDW[Sar]EHRhC(1)[Sar]EAE[Peg3][Peg3]-K([17-Carboxy-heptadecanoyl][γGlu]G[γGlu])-NH2 (Compound 149)
Ac-SEFA(1)I[1-Me-Trp]QDW[Sar]EHRhC(1)[Sar]EGE[Peg3]ES-K([17-Carboxy-heptadecanoyl][γGlu]G[γGlu])-NH2 (Compound 150; analogue of Compound 166)
Ac-GEFA(1)l[1-Me-Trp]QEWGEHRhC(1)[Sar]EGE[Peg3]ES-K([17-Carboxy-heptadecanoyl][γGlu]G[γGlu])-NH2 (Compound 155)
Ac-EFA(1)1[1-Me-Trp]QEWGEHRhC(1)[Sar]EA[Peg3][Peg3]-K([17-Carboxy-heptadecanoyl][γGlu]G[γGlu])-NH2 (Compound 158)
wherein the side chains of residues designated A(1) and hC(1) form a cystathionine bridge.

42. A compstatin analogue according to claim 1 which is:
Ac-IC(1)IWQDWGEHRA(1)TEG-K([15-carboxy-pentadecanoyl][γGlu])-NH2 (analogue of Compound 92)
Ac-IC(1)IWQDWGEHRA(1)TEG-K([15-carboxy-pentadecanoyl][γGlu][Peg3][Peg3])-NH2 (analogue of Compound 93)
Ac-IC(1)IWQDWGEHRA(1)TEGE-K([15-carboxy-pentadecanoyl][γGlu][Peg3][Peg3])-NH2 (analogue of Compound 94)
Ac-IC(1)IWQDWGEHRA(1)TEG-K((15-carboxy-pentadecanoyl)-[(Piperazine-1-yl)-acetyl][Peg3][Peg3])-NH2 (analogue of Compound 95)
Ac-IC(1)IWQDWGEHRA(1)TEG-K([17-carboxy-heptadecanoyl][γGlu][Peg3][Peg3])-NH2 (analogue of Compound 96)
Ac-IC(1)IWQDWGEHRA(1)TEGE-K([17-carboxy-heptadecanoyl][γGlu][Peg3][Peg3])-NH2 (analogue of Compound 97)
Ac-IC(1)IWQDWGEHRA(1)TEG-K([19-carboxy-nonadecanoyl][γGlu][Peg3][Peg3])-NH2 (analogue of Compound 98)
[15-Carboxy-pentadecanoyl]-ESSAIC(1)IWQDWGEHRA(1)TEGE-NH2 (analogue of Compound 99)
Ac-[K([15-carboxy-pentadecanoyl][γGlu][Peg3][Peg3])]-GSAIC(1)IWQDWGEHRA(1)TEGE-NH2 (analogue of Compound 100)
Ac-EGSAIC(1)IWQDWGEHRA(1)TEG-K([15-carboxy-pentadecanoyl][γGlu])-NH2 (analogue of Compound 101)
Ac-FC(1)1[1-Me-Trp]QDWGEHRA(1)TGAES-K([15-carboxy-pentadecanoyl][γGlu][Peg3][Peg3])-NH2 (analogue of Compound 102)
Ac-EGSAYC(1)1[1-Me-Trp]QDWGEH-K([15-carboxy-pentadecanoyl][γGlu][Peg3][Peg3])-A(1)[Sar]E-NH2 (analogue of Compound 103)
Ac-EGSAYC(1)1[1-Me-Trp]QDWGEHRA(1)[Sar]EG-K([15-carboxy-pentadecanoyl][γGlu][Peg3][Peg3])-NH2 (analogue of Compound 104)
Ac-SAYC(1)1[1-Me-Trp]QDWGEHRA(1)[Sar]E-K([17-carboxy-heptadecanoyl][γGlu]KG[γGlu])-NH2 (analogue of Compound 105)
Ac-SAYC(1)1[1-Me-Trp]QDWGEHRA(1)[Sar]E-K([17-carboxy-heptadecanoyl][γGlu]G[γGlu])-NH2 (analogue of Compound 106)
[15-Carboxy-pentadecanoyl]-EGSEYC(1)1[1-Me-Trp]QDWGEHRA(1)[Sar]E-NH2 (analogue of Compound 107)
[17-Carboxy-heptadecanoyl]-EGSEYC(1)1[1-Me-Trp]QDWGEHRA(1)[Sar]E-NH2 (analogue of Compound 108)
Ac-EGSAYC(1)1[1-Me-Trp]QDWGEHRA(1)[Sar]EGE-K([17-carboxy-heptadecanoyl][γGlu]G[γGlu])-NH2 (analogue of Compound 109)
Ac-EGSAYC(1)1[1-Me-Trp]QDWGEHRA(1)[Sar]EGK-K([17-carboxy-heptadecanoyl][γGlu]G[γGlu])-NH2 (analogue of Compound 110)
Ac-EGSAYC(1)l[1-Me-Trp]QDWGEHRA(1)[Sar]EK([γGlu]-K([17-carboxy-heptadecanoyl][γGlu](peg3)(peg3))-NH2 (analogue of Compound 111, 159)
Ac-SEYC(1)1[1-Me-Trp]QDWGEHRA(1)[Sar]EGA-K([17-carboxy-heptadecanoyl][γGlu]-G[γGlu])-NH2 (analogue of Compound 112)
Ac-ASGEYC(1)1[1-Me-Trp]QDWGEHRA(1)[Sar]EGE-K([17-carboxy-heptadecanoyl][γGlu]-G[γGlu])-NH2 (analogue of Compound 113)
Ac-SEYC(1)I[1-Me-Trp]QDWGEHRA(1)[Sar]EGE-K([17-carboxy-heptadecanoyl][γGlu]-G[γGlu])-NH2 (analogue of Compound 114)
Ac-SEYC(1)1[1-Me-Trp]QDWGEHRA(1)[Sar]EGK-K([17-carboxy-heptadecanoyl][γGlu]-G[γGlu])-NH2 (analogue of Compound 115)
Ac-SEYC(1)l[1-Me-Trp]QDWGEHRA(1)[Sar]EGE-K([17-carboxy-heptadecanoyl][γGlu]-K[γGlu])-NH2 (analogue of Compound 116)
Ac-SEYC(1)1[1-Me-Trp]QDWGEHRA(1)[Sar]EGE[Peg3][Peg3]-K([17-carboxy-heptadecanoyl][γGlu]-G[γGlu])-NH2 (analogue of Compound 117)
Ac-SEYC(1)1[1-Me-Trp]QDWGEHRA(1)[Sar]EGA-K([17-carboxy-heptadecanoyl]-[γGlu]G[Peg3][γGlu][Peg3])-NH2 (analogue of Compound 118)
Ac-SEFC(1)I[1-Me-Trp]QDWGEHRA(1)[Sar]EGA-K([17-carboxy-heptadecanoyl-][γGlu]G[Peg3][γGlu][Peg3])-NH2 (analogue of Compound 119, 154)
Ac-SEFC(1)1[1-Me-Trp]QEWGEHRA(1)[Sar]EGA-K([17-carboxy-heptadecanoyl]-[γGlu]G[Peg3][γGlu][Peg3])-NH2 (analogue of Compound 120)
Ac-SEYC(1)1[1-Me-Trp]QEW[Sar]EHRA(1)[Sar]EK[γGlu]A-K([17-carboxy-heptadecanoyl]-[γGlu]G[Peg3][γGlu][Peg3])-NH2 (analogue of Compound 121)
Ac-SEYC(1)1[1-Me-Trp]QEWGEHRA(1)[Sar]EGA-K([17-carboxy-heptadecanoyl]-[γGlu]G[Peg3][γGlu][Peg3])-NH2 (analogue of Compound 122)
Ac-SEFC(1)I[1-Me-Trp]QDWGEHRA(1)[Sar]EGE[Peg3][Peg3]-K([17-carboxy-heptadecanoyl][γGlu]G[γGlu])-NH2 (analogue of Compound 123, 146 and 152)
Ac-SEFC(1)1[1-Me-Trp]QEWGEHRA(1)[Sar]EGE[Peg3[Peg3]-K([17-carboxy-heptadecanoyl]-[γGlu]G[γGlu])-NH2 (analogue of Compound 124, 153, 167)
Ac-SEYC(1)1[1-Me-Trp]QEWGEHRA(1)[Sar]EGE[Peg3][Peg3]-K([17-carboxy-heptadecanoyl][γGlu]G[γGlu])-NH2 (analogue of Compound 125)
Ac-SEFC(1)1[1-Me-Trp]QDWGEHRA(1)TEGE[Peg3][Peg3]-K([17-carboxy-heptadecanoyl)[γGlu]G[γGlu]])-NH2 (analogue of Compound 126, 156)
Ac-SEFC(1)1[1-Me-Trp]QDWGEHRA(1)[Sar]-EGE-[Peg3][Peg3]-K([15-carboxy-pentadecanoyl][γGlu]G[γGlu])-NH2 (analogue of Compound 127)
Ac-SEFC(1)1[1-Me-Trp]QDWGEHRA(1)[Sar]EGE[Peg3][Peg3]-K([19-carboxy-nonadecanoyl][γGlu]G[γGlu])-NH2 (analogue of Compound 128)
Ac-SEFC(1)I[1-Me-Trp]QDWGEHRA(1)[Sar]EGEGGG-K([17-carboxy-heptadecanoyl]-[γGlu]G[γGlu])-NH2 (analogue of Compound 129)
Ac-SEFC(1)1[1-Me-Trp]QDWGEHRA(1)TEGEGGG-K([17-carboxy-heptadecanoyl]-[γGlu]G[γGlu])-NH2 (analogue of Compound 130, 157)
Ac-SEFC(1)l[1-Me-Trp]-QDWGEHRA(1)TEGEGGG-K([15-carboxy-pentadecanoyl][γGlu]-G[γGlu])-NH2 (analogue of Compound 131)
Ac-SEFC(1)1[1-Me-Trp]-QDWGEHRA(1)[Sar]EK[γGlu]GGG-K([17-carboxy-heptadecanoyl][γGlu]-G[γGlu])-NH2 (analogue of Compound 132)
Ac-SEFC(1)1[1-Me-Trp]QDWGEHRA(1)TEK[γGlu]GGG-K([17-carboxy-heptadecanoyl][γGlu]-G[γGlu])-NH2 (analogue of Compound 133)
Ac-EFC(1)1[1-Me-Trp]QDWGEHRA(1)EGE-K([17-carboxy-heptadecanoyl][γGlu]G[γGlu])-NH2 (analogue of Compound 134, 161)
Ac-SEFC(1)1[1-Me-Trp]QDWGEHRA(1)TGAES-K([15-carboxy-hexadecanoyl][γGlu]G[γGlu])-NH2 (analogue of Compound 135)
Ac-SEFC(1)l[1-Me-Trp]QDWGEHRA(1)TEGE[8-aminooctanoyl]-K([17-carboxy-heptadecanoyl][γGlu]-G[γGlu])-NH2 (analogue of Compound 136)
Ac-SEFC(1)l[1-Me-Trp]QDWGEHRA(1)TEGE[8-aminooctanoyl]E-K([17-carboxy-heptadecanoyl][γGlu]G[γGlu]])-NH2 (analogue of Compound 137)
Ac-SEFC(1)1[1-Me-Trp]QDWGEHRA(1)[Sar]EGE[Peg3]-K([17-carboxy-heptadecanoyl]-[γGlu]G[γGlu])-NH2 (analogue of Compound 138)
Ac-SEFC(1)1[1-Me-Trp]QDWGEHRA(1)[Sar]EGESES-K([17-carboxy-heptadecanoyl]-[γGlu]G[γGlu])-NH2 (analogue of Compound 139)
Ac-SEFC(1)1[1-Me-Trp]QDWGEHRA(1)[Sar]EGE[Peg3]ES-K([17-carboxy-heptadecanoyl]-[γGlu]G[γGlu])-NH2 (analogue of Compound 140)
Ac-SEFC(1)1[1-Me-Trp]QDWGEHRA(1)[Sar]EGESES-K([17-carboxy-heptadecanoyl][γGlu])-NH2 (analogue of Compound 141)
Ac-SEFC(1)1[1-Me-Trp]QDWGEHRA(1)TEGE[Peg3]ES-K([17-carboxy-heptadecanoyl][γGlu])-NH2 (analogue of Compound 142, 148, 165)
Ac-SEFC(1)1[1-Me-Trp]QDWGEHRA(1)TEGE[Peg3]ES-K([17-carboxy-heptadecanoyl][γGlu])-OH (analogue of Compound 163)
Ac-SEFC(1)1[1-Me-Trp]QDWGEHRA(1)[Sar]EGE[Peg3][Peg3][Peg3]-K([17-carboxy-heptadecanoyl][γGlu]G[γGlu])-NH2 (analogue of Compound 143)
Ac-SEFC(1)1[1-Me-Trp]QDW[Sar]EHRA(1)[Sar]E[Peg3][Peg3]-K([17-carboxy-heptadecanoyl][γGlu]G[γGlu])-NH2 (analogue of Compound 144, 147, 164)
Ac-SEFC(1)l[1-Me-Trp]QDW[Sar]EHRA(1)[Sar]E[Peg3][Peg3]-K([17-carboxy-heptadecanoyl][γGlu]G[γGlu])-OH (analogue of Compound 162)
Ac-EF[C(1)1[1-Me-Trp]QDWGEHRA(1)[Sar]EA[Peg3][Peg3]-K([17-carboxy-heptadecanoyl][γGlu]G[γGlu])-NH2 (analogue of Compound 145)
Ac-GEFC(1)1[1-Me-Trp]QDW[Sar]EHRA(1)[Sar]EAE[Peg3][Peg3]-K([17-Carboxy-heptadecanoyl][γGlu]G[γGlu])-NH2 (analogue of Compound 149)
Ac-SEFC(1)1[1-Me-Trp]QDW[Sar]EHRA(1)[Sar]EGE[Peg3]ES-K([17-Carboxy-heptadecanoyl][γGlu]G[γGlu])-NH2 (analogue of Compound 150, 166)
Ac-GEFC(1)1[1-Me-Trp]QEWGEHRA(1)[Sar]EGE[Peg3]ES-K([17-Carboxy-heptadecanoyl][γGlu]G[γGlu])-NH2 (analogue of Compound 155)
Ac-EFC(1)1[1-Me-Trp]QEWGEHRA(1)[Sar]EA[Peg3][Peg3]-K([17-Carboxy-heptadecanoyl][γGlu]G[γGlu])-NH2 (analogue of Compound 158)
wherein the side chains of residues designated C(1) and A(1) form a lanthionine bridge.

43. A composition comprising a compstatin analogue according to any one of claims 1 to 42, or a pharmaceutically acceptable salt or solvate thereof, in admixture with a carrier.

44. A composition according to claim 43, wherein the composition is a pharmaceutical composition and the carrier is a pharmaceutically acceptable carrier.

45. A pharmaceutical composition comprising a compstatin analogue according to any one of claims 1 to 42, or a pharmaceutically acceptable salt or solvate thereof, in admixture with a pharmaceutically acceptable carrier, excipient or vehicle.

46. A compstatin analogue, or a pharmaceutically acceptable salt or solvate thereof, according to any one of claims 1 to 42 for use in therapy.

47. A compstatin analogue, or a pharmaceutically acceptable salt or solvate thereof, according to any one of claims 1 to 42 for use in a method of inhibiting complement activation.

48. The compstatin analogue, or a pharmaceutically acceptable salt or solvate thereof, for use according to claim 47, wherein inhibiting complement activation comprises one or more biological activities selected from (1) binding to C3 protein, (2) binding to C3b protein and/or (3) inhibiting the cleavage of native C3 by C3 convertases.

49. A compstatin analogue, or a pharmaceutically acceptable salt or solvate thereof, according to any one of claims 1 to 42 for use in a method of prophylaxis or treatment of age-related macular degeneration, Stargardt disease, periodontitis, diabetic retinopathy, glaucoma, uveitis, rheumatoid arthritis, spinal cord injury, stroke, multiple sclerosis, Parkinson's disease, Alzheimer's disease, cancer, and respiratory disorders such as asthma, chronic obstructive pulmonary disease (COPD), allergic inflammation, emphysema, bronchitis, bronchiecstasis, cystic fibrosis, tuberculosis, pneumonia, respiratory distress syndrome (RDS—neonatal and adult), rhinitis and sinusitis; bacterial infections such as sepsis, ischemia-reperfusion injury in various tissues, myocardial infarction, anaphylaxis, paroxysmal nocturnal hemoglobinuria, autoimmune hemolytic anemias, psoriasis, hidradentitis suppurativa, myasthenia gravis, systemic lupus erythematosus, CHAPLE syndrome, C3 glomeropathy, IgA nephropathy, atypical hemolytic uremic syndrome, Crohn's disease, ulcerative colitis or antiphospholipid syndrome.

50. A compstatin analogue, or a pharmaceutically acceptable salt or solvate thereof, according to any one of claims 1 to 42 for use in a method of inhibiting complement activation that occurs during cell or organ transplantation.

51. A method of inhibiting complement activation for treating a subject in need thereof, the method comprising administering to the subject a compstatin analogue, or a pharmaceutically acceptable salt or solvate thereof, according to any one of claims 1 to 42 thereby to inhibit complement activation in the subject.

52. The method of claim 51, wherein the subject has age-related macular degeneration, Stargardt disease, periodontitis, diabetic retinopathy, glaucoma, uveitis, rheumatoid arthritis, spinal cord injury, stroke, multiple sclerosis, Parkinson's disease, Alzheimer's disease, cancer, and respiratory disorders such as asthma, chronic obstructive pulmonary disease (COPD), allergic inflammation, emphysema, bronchitis, bronchiecstasis, cystic fibrosis, tuberculosis, pneumonia, respiratory distress syndrome (RDS—neonatal and adult), rhinitis and sinusitis; bacterial infections such as sepsis, ischemia-reperfusion injury in various tissues, myocardial infarction, anaphylaxis, paroxysmal nocturnal hemoglobinuria, autoimmune hemolytic anemias, psoriasis, hidradentitis suppurativa, myasthenia gravis, systemic lupus erythematosus, CHAPLE syndrome, C3 glomeropathy, IgA nephropathy, atypical hemolytic uremic syndrome, Crohn's disease, ulcerative colitis or antiphospholipid syndrome, the method comprising administering to the subject a compstatin analogue according to any one of claims 1 to 30.

53. An ex vivo method of inhibiting complement activation during extracorporeal shunting of a physiological fluid, the method comprising contacting the physiological fluid with a compstatin analogue, or a pharmaceutically acceptable salt or solvate thereof, according to any one of claims 1 to 42, thereby inhibiting complement activation.

54. Use of a compstatin analogue, or a pharmaceutically acceptable salt or solvate thereof, according to any one of claims 1 to 42, in the preparation of a medicament for inhibiting complement activation.

55. Use of a compstatin analogue, or a pharmaceutically acceptable salt or solvate thereof, according to any one of claims 1 to 42 in the preparation of a medicament for the treatment of age-related macular degeneration, Stargardt disease, periodontitis, diabetic retinopathy, glaucoma, uveitis, rheumatoid arthritis, spinal cord injury, stroke, multiple sclerosis, Parkinson's disease, Alzheimer's disease, cancer, and respiratory disorders such as asthma, chronic obstructive pulmonary disease (COPD), allergic inflammation, emphysema, bronchitis, bronchiecstasis, cystic fibrosis, tuberculosis, pneumonia, respiratory distress syndrome (RDS—neonatal and adult), rhinitis and sinusitis; bacterial infections such as sepsis, ischemia-reperfusion injury in various tissues, myocardial infarction, anaphylaxis, paroxysmal nocturnal hemoglobinuria, autoimmune hemolytic anemias, psoriasis, hidradentitis suppurativa, myasthenia gravis, systemic lupus erythematosus, CHAPLE syndrome, C3 glomeropathy, IgA nephropathy, atypical hemolytic uremic syndrome, Crohn's disease, ulcerative colitis or antiphospholipid syndrome.
